United States Patent Application Publication US 2025/0011887 A1 - sequence listing, part 2

SEQ ID NO: 13050 - DNA, 80 bp, synthetic construct
  misc_feature 1..80: note = Synthetic: >AlphaCoV1-cand-10970-11049
  source 1..80: mol_type = other DNA
aaatacatgactgctaacaacctgtctgcacctaagactgcatatgatgctatgattcttagtgttaaattgatgggcat

SEQ ID NO: 13051 - DNA, 80 bp, synthetic construct
  misc_feature 1..80: note = Synthetic: >AlphaCoV1-cand-11050-11129
  source 1..80: mol_type = other DNA
tggtggtgagagaaacatcaaaatttccactgtacagtctaaacttacagagatgaaatgtacgaatgttgtcttgctcg

SEQ ID NO: 13052 - DNA, 80 bp, synthetic construct
  misc_feature 1..80: note = Synthetic: >AlphaCoV1-cand-11130-11209
  source 1..80: mol_type = other DNA
gtcttttgtctaaaatgcatgttgaatctaattcaaaagagtggaactattgtgttggtctgcataatgagatcaatttt

SEQ ID NO: 13053 - DNA, 80 bp, synthetic construct
  misc_feature 1..80: note = Synthetic: >AlphaCoV1-cand-11210-11289
  source 1..80: mol_type = other DNA
tgtgatgaccctgaagtcgttcttgaaaaattattagctcttattgcattctttttgtccaaacataacacatgtgacct

SEQ ID NO: 13054 - DNA, 80 bp, synthetic construct
  misc_feature 1..80: note = Synthetic: >AlphaCoV1-cand-11290-11369
  source 1..80: mol_type = other DNA
tagtgatcttattgaatcctattttgagaacaccactattctacagagtgtggcatctgcttatgctgctttgcctagct

SEQ ID NO: 13055 - DNA, 80 bp, synthetic construct
  misc_feature 1..80: note = Synthetic: >AlphaCoV1-cand-11370-11449
  source 1..80: mol_type = other DNA
ggattgcatatgaaaaagctcgtgctgatctagaagaggctaagaaaaatgatgttagccctcaacttttgaaacagctt

SEQ ID NO: 13056 - DNA, 80 bp, synthetic construct
  misc_feature 1..80: note = Synthetic: >AlphaCoV1-cand-11450-11529
  source 1..80: mol_type = other DNA
acaaaggcttgtaatattgctaagagtgaatttgagcgcgaagcttcagtgcaaaagaagcttgacaaaatggcagagca

SEQ ID NO: 13057 - DNA, 80 bp, synthetic construct
  misc_feature 1..80: note = Synthetic: >AlphaCoV1-cand-11530-11609
  source 1..80: mol_type = other DNA
ggctgcagctagtatgtacaaagaggcacgagctgtggacagaaagtcaaaaatagtttctgctatgcatagtctacttt

SEQ ID NO: 13058 - DNA, 80 bp, synthetic construct
  misc_feature 1..80: note = Synthetic: >AlphaCoV1-cand-11610-11689
  source 1..80: mol_type = other DNA
ttggtatgcttaagaaacttgacatgtccagtgttaacactattattgaccaggctcgtaatggtgtgttaccattgagt

SEQ ID NO: 13059 - DNA, 80 bp, synthetic construct
  misc_feature 1..80: note = Synthetic: >AlphaCoV1-cand-11690-11769
  source 1..80: mol_type = other DNA
attataccagctgcatcagctacaagacttattgttgtaacacctaaccttgaagtgctttccaagattaggcaagaaaa

SEQ ID NO: 13060 - DNA, 80 bp, synthetic construct
  misc_feature 1..80: note = Synthetic: >AlphaCoV1-cand-11770-11849
  source 1..80: mol_type = other DNA
caatgtacattatgcaggtgctatttggtcaattgttgaagttaaggatgctaatggttcacaagtccattttaaggaag

SEQ ID NO: 13061 - DNA, 80 bp, synthetic construct
  misc_feature 1..80: note = Synthetic: >AlphaCoV1-cand-11850-11929
  source 1..80: mol_type = other DNA
tcacagctgccaatgaattaaaccttacctggccattgagtataacttgtgagagaaccacaaagttgcagaacaatgaa

SEQ ID NO: 13062 - DNA, 80 bp, synthetic construct
  misc_feature 1..80: note = Synthetic: >AlphaCoV1-cand-11930-12009
  source 1..80: mol_type = other DNA
attatgccaggtaaacttaaagagagagctgttaaagcgtctgctacaattgatggtgatgcttatggtagtggtaaggc

SEQ ID NO: 13063 - DNA, 80 bp, synthetic construct
  misc_feature 1..80: note = Synthetic: >AlphaCoV1-cand-12010-12089
  source 1..80: mol_type = other DNA
tcttatggcttctgaaagtggtaaaagctttatgtatgcatttatagcatcagacagcaaccttaagtatgttaaatggg

SEQ ID NO: 13064 - DNA, 80 bp, synthetic construct
  misc_feature 1..80: note = Synthetic: >AlphaCoV1-cand-12090-12169
  source 1..80: mol_type = other DNA
agagcaataatgatgtaatacctattgaacttgaagctccattgcgcttctatgttgatggcgctaatggtcctgaagtt

SEQ ID NO: 13065 - DNA, 80 bp, synthetic construct
  misc_feature 1..80: note = Synthetic: >AlphaSp-cand-6270-6349
  source 1..80: mol_type = other DNA
acttaaaaagagggatatgaaagtcatggccggtgtacctgaacggactggtataatacttaaacgtagtgtgaagtaca

SEQ ID NO: 13066 - DNA, 80 bp, synthetic construct
  misc_feature 1..80: note = Synthetic: >AlphaSp-cand-6350-6429
  source 1..80: mol_type = other DNA
attacaaagcactgaaatttttcttcaggctaaaatttcaatacattaaagtgtttttgaagtttagtttgtttttgtac

SEQ ID NO: 13067 - DNA, 80 bp, synthetic construct
  misc_feature 1..80: note = Synthetic: >AlphaSp-cand-6430-6509
  source 1..80: mol_type = other DNA
acgttatatgcactaatgtttatgtttatacgatttacacctgttggcacacctatatgcaagcagtatacagatggtta

SEQ ID NO: 13068 - DNA, 80 bp, synthetic construct
  misc_feature 1..80: note = Synthetic: >AlphaSp-cand-6510-6589
  source 1..80: mol_type = other DNA
tgcaaattctacattcgataagaatgagtattgtggtaacgttttgtgtaagatttgcttgtatggttatgaagaattgt

SEQ ID NO: 13069 - DNA, 80 bp, synthetic construct
  misc_feature 1..80: note = Synthetic: >AlphaSp-cand-6590-6669
  source 1..80: mol_type = other DNA
cagattttacacacacacgtgttatttggcaacaccttaaagaccctcttattggtaacattttgcctttgttctatttg

SEQ ID NO: 13070 - DNA, 80 bp, synthetic construct
  misc_feature 1..80: note = Synthetic: >AlphaSp-cand-6830-6909
  source 1..80: mol_type = other DNA
cttttattgttaccagaatattgctctttcttaagcatgtcctttttggttgtgataaaccctcttgcatagcttgttca

SEQ ID NO: 13071 - DNA, 80 bp, synthetic construct
  misc_feature 1..80: note = Synthetic: >AlphaSp-cand-6910-6989
  source 1..80: mol_type = other DNA
aagagtgctaaactcactagagtcccgctgcaaactattttacagggtgttactaagtcattttatgttaatgccaatgg

SEQ ID NO: 13072 - DNA, 80 bp, synthetic construct
  misc_feature 1..80: note = Synthetic: >AlphaSp-cand-6990-7069
  source 1..80: mol_type = other DNA
tggtaaaaagttttgtaagaaacacaatttcttttgtgttgattgtgattcttacggttacggttgtacctttattaatg

SEQ ID NO: 13073 - DNA, 80 bp, synthetic construct
  misc_feature 1..80: note = Synthetic: >AlphaSp-cand-7230-7309
  source 1..80: mol_type = other DNA
gtatgcctgtaaggatgtgcttaaaaactgtaatatgttaactgattttattgtgtttaacaatagtggttctaatgtga

SEQ ID NO: 13074 - DNA, 80 bp, synthetic construct
  misc_feature 1..80: note = Synthetic: >AlphaSp-cand-7310-7389
  source 1..80: mol_type = other DNA
cgcaagttaaaaatgcttgtgtttacttttcacaactgctttgtaagcctataaagttggtagactcggcgttgcttgct

SEQ ID NO: 13075 - DNA, 80 bp, synthetic construct
  misc_feature 1..80: note = Synthetic: >AlphaSp-cand-7470-7549
  source 1..80: mol_type = other DNA
aaattgtagtaatatgaatgagtgtcgtgaatctctcggtcttagtgatgtttcagaagaggagtttagtgctgctgttt

SEQ ID NO: 13076 - DNA, 80 bp, synthetic construct
  misc_feature 1..80: note = Synthetic: >Anlong-cand-6030-6109
  source 1..80: mol_type = other DNA
tactggtattatactaacgcgtagtcttaagtataattgtaaagctgccttgaagttttggaaaactcgaagctggtata

SEQ ID NO: 13077 - DNA, 80 bp, synthetic construct
  misc_feature 1..80: note = Synthetic: >Anlong-cand-6110-6189
  source 1..80: mol_type = other DNA
taatgctaatgctgaagctattgcttttggcatatacattatatgcagctggctttatgatagtacgctatagtttcttt

SEQ ID NO: 13078 - DNA, 80 bp, synthetic construct
  misc_feature 1..80: note = Synthetic: >Anlong-cand-6190-6269
  source 1..80: mol_type = other DNA
aataactatatatgcaaaggttatgttgatggttatgccaattctacatttgttaagaaggatttctgtgatggtggtct

SEQ ID NO: 13079 - DNA, 80 bp, synthetic construct
  misc_feature 1..80: note = Synthetic: >Anlong-cand-6270-6349
  source 1..80: mol_type = other DNA
cgtttgtgatgcttgtcttcacggattcgaccaactgccagactttaatcatcttaatgtcaaatgggattacatcactg

SEQ ID NO: 13080 - DNA, 80 bp, synthetic construct
  misc_feature 1..80: note = Synthetic: >Anlong-cand-6350-6429
  source 1..80: mol_type = other DNA
tgccctttgctattaaagtttacccttcagttgtggccatacttttgtttttgctgggcggtaattacgtcaagttcatg

SEQ ID NO: 13081 - DNA, 80 bp, synthetic construct
  misc_feature 1..80: note = Synthetic: >Anlong-cand-6430-6509
  source 1..80: mol_type = other DNA
atgttgtatgtgcttgctcagtatgttaacagttgtggtgtgtattttggacttcaggcacatttttggcctgttcacat

SEQ ID NO: 13082 - DNA, 80 bp, synthetic construct
  misc_feature 1..80: note = Synthetic: >Anlong-cand-6510-6589
  source 1..80: mol_type = other DNA
aattccatttgacgtgttttgtgatgagatttttgcaatttttgttgctgttaagagtctcctgtttataaagcatgtct

SEQ ID NO: 13083 - DNA, 80 bp, synthetic construct
  misc_feature 1..80: note = Synthetic: >Anlong-cand-6590-6669
  source 1..80: mol_type = other DNA
ttatgggttgtgatagtcctaattgcatcgcttgttccaagagtgctcgactgaagcgtgtgcccatgacaactgttgtc

SEQ ID NO: 13084 - DNA, 80 bp, synthetic construct
  misc_feature 1..80: note = Synthetic: >Anlong-cand-6670-6749
  source 1..80: mol_type = other DNA
aatggtgcaaacaagtctttttatgttacagcaaatggtggtactaagttctgcactaagcataacttcttttgtgttga

SEQ ID NO: 13085 - DNA, 80 bp, synthetic construct
  misc_feature 1..80: note = Synthetic: >Anlong-cand-6750-6829
  source 1..80: mol_type = other DNA
ttgtgactcatatggtaataactccacctttattaatgagcatattgcacgagagcttagtaatgtcactaaaacagcag

SEQ ID NO: 13086 - DNA, 80 bp, synthetic construct
  misc_feature 1..80: note = Synthetic: >Anlong-cand-6830-6909
  source 1..80: mol_type = other DNA
tcaaacctacaggtccagcttatattgagatagaccgtgttgatttttcaaacggattttatcgcttgtatagtggtgac

SEQ ID NO: 13087 - DNA, 80 bp, synthetic construct
  misc_feature 1..80: note = Synthetic: >Anlong-cand-6910-6989
  source 1..80: mol_type = other DNA
acgttttggcgctacaattttgacattactgagggtaaatatagttgcaaggaggttcttaaaaactgtaacgcaataga

SEQ ID NO: 13088 - DNA, 80 bp, synthetic construct
  misc_feature 1..80: note = Synthetic: >Anlong-cand-6990-7069
  source 1..80: mol_type = other DNA
tgactttattgtttacaataatagtggtactaatgttacacaggttagaaatgcttgtgtttaccttagtcagcttatgt

SEQ ID NO: 13089 - DNA, 80 bp, synthetic construct
  misc_feature 1..80: note = Synthetic: >Anlong-cand-7070-7149
  source 1..80: mol_type = other DNA
gtaaacctataaaattagtagactcagagttgcttgcttctctaaatgttgactttaatggtgcactgcataaagccttt

SEQ ID NO: 13090 - DNA, 80 bp, synthetic construct
  misc_feature 1..80: note = Synthetic: >Anlong-cand-7150-7229
  source 1..80: mol_type = other DNA
gttgaggttttacaaaatagctttagtgtagagcttgatggctgtactactatggcagagtgcaaagagaaaataggttt

SEQ ID NO: 13091 - DNA, 80 bp, synthetic construct
  misc_feature 1..80: note = Synthetic: >Anlong-cand-7230-7309
  source 1..80: mol_type = other DNA
ggatgttgctgatgatgaatttgttaatgccgttactaacgcacaccgctatgatgtgttgcttagtgaggtttcattta

SEQ ID NO: 13092 - DNA, 80 bp, synthetic construct
  misc_feature 1..80: note = Synthetic: >Beluga-cand-27860-27939
  source 1..80: mol_type = other DNA
aagccccaatgagaaggataagccctttcagtcttattttaagtttcctgaggatagtgactcagatgatgaagatgatg

SEQ ID NO: 13093 - DNA, 80 bp, synthetic construct
  misc_feature 1..80: note = Synthetic: >Beluga-cand-27940-28019
  source 1..80: mol_type = other DNA
atgaaccacaagaagacctacctgatgggtatgagtctgacagtggaaatactgatgaacgaaacatggtatatgctgcc

SEQ ID NO: 13094 - DNA, 80 bp, synthetic construct
  misc_feature 1..80: note = Synthetic: >Beluga-cand-28020-28099
  source 1..80: mol_type = other DNA
cttgttacggctggtatggataaagatagagccaagtatgtgacggctcaggctctgccacaccgttactttctttgcta

SEQ ID NO: 13095 - DNA, 80 bp, synthetic construct
  misc_feature 1..80: note = Synthetic: >Beluga-cand-28100-28179
  source 1..80: mol_type = other DNA
taatgattattaccacgattttcttgtggatggaaatggtccggcacaggcaaattatgaagctaagaaatgggctaggc

SEQ ID NO: 13096 - DNA, 80 bp, synthetic construct
  misc_feature 1..80: note = Synthetic: >Beluga-cand-28180-28259
  source 1..80: mol_type = other DNA
gagtttgttcaggcaagcaaggtcctggtgagggaaattaaacatgaaggtgtttattttcatcgcaattttgaccttga

SEQ ID NO: 13097 - DNA, 80 bp, synthetic construct
  misc_feature 1..80: note = Synthetic: >Beluga-cand-28260-28339
  source 1..80: mol_type = other DNA
cctcttcttatgaagttgatgaagaattcacagggcattatagtaaaaatggcttggtttttaattctcaatttgatcag

SEQ ID NO: 13098 - DNA, 80 bp, synthetic construct
  misc_feature 1..80: note = Synthetic: >Beluga-cand-28340-28419
  source 1..80: mol_type = other DNA
atgcttacaggacctatgatttgcaaaggtaatgcaggcaaattgacttgtcatgagagttccgctaatacttgagtaga

SEQ ID NO: 13099 - DNA, 80 bp, synthetic construct
  misc_feature 1..80: note = Synthetic: >Beluga-cand-28420-28499
  source 1..80: mol_type = other DNA
ttgggaggagtctagggatggttgtgaagacttatccattgattcccctattaccgaagatggcgagaaagttaatgatt

SEQ ID NO: 13100 - DNA, 80 bp, synthetic construct
  misc_feature 1..80: note = Synthetic: >Beluga-cand-28500-28579
  source 1..80: mol_type = other DNA
gtaaggcttttaccaagaatctttatgatttggggtatgtaaaaggtgttgttagcggccataataagtgtttatttcgc

SEQ ID NO: 13101 - DNA, 80 bp, synthetic construct
  misc_feature 1..80: note = Synthetic: >Beluga-cand-28580-28659
  source 1..80: mol_type = other DNA
cgtactaattttgtgaggcattttgtcagaaagaatattctgattttggtctctcgtaggaaggaagaggataccatcaa

SEQ ID NO: 13102 - DNA, 80 bp, synthetic construct
  misc_feature 1..80: note = Synthetic: >Beluga-cand-28660-28739
  source 1..80: mol_type = other DNA
gcttagttgctggatggcactcactcgtgaaagttatgatgaaagctaaggtatatttttagccctagtgtattgtttat

SEQ ID NO: 13103 - DNA, 80 bp, synthetic construct
  misc_feature 1..80: note = Synthetic: >Beluga-cand-28740-28819
  source 1..80: mol_type = other DNA
tgatactctagtttaatatttttgactagtgtactgtttttgtagtcactgaattttaattttattttaggcagtgactt

SEQ ID NO: 13104 - DNA, 80 bp, synthetic construct
  misc_feature 1..80: note = Synthetic: >Beluga-cand-28820-28899
  source 1..80: mol_type = other DNA
atattgtattgctttcctgttatagtcataaacagaaaggcatgtatgttgtgcttttggcactagttttgtatttgtta

SEQ ID NO: 13105 - DNA, 80 bp, synthetic construct
  misc_feature 1..80: note = Synthetic: >Beluga-cand-28900-28979
  source 1..80: mol_type = other DNA
attaatgaggaaatacccgcgattgtaaacgggctttccattattgtgtttatattgttattagaggagtgtgataaaat

SEQ ID NO: 13106 - DNA, 80 bp, synthetic construct
  misc_feature 1..80: note = Synthetic: >Beluga-cand-28980-29059
  source 1..80: mol_type = other DNA
gcaccctttatattgttattgtagaatgattgagataccgggagatggctttttgaattaaaggccaattaccagagttt

SEQ ID NO: 13107 - DNA, 80 bp, synthetic construct
  misc_feature 1..80: note = Synthetic: >Beluga-cand-29060-29139
  source 1..80: mol_type = other DNA
taaaagaacccaaattaaagaagggagttgtttaaacatgaggtggattaaccgcttctatggcaagctttttgctgtcg

SEQ ID NO: 13108 - DNA, 80 bp, synthetic construct
  misc_feature 1..80: note = Synthetic: >BetaSp-cand-4520-4599
  source 1..80: mol_type = other DNA
agatgtttgttttgtaaaaggtgatattatagatgttgctaagaaggtctttgctgatgttgttgtgaaccctgccaaca

SEQ ID NO: 13109 - DNA, 80 bp, synthetic construct
  misc_feature 1..80: note = Synthetic: >BetaSp-cand-4600-4679
  source 1..80: mol_type = other DNA
gccatatggcgcatggtggcggtgtagcaaaagcaatcgcaagggcagctggcgatgcctttaataaagagacttctgac

SEQ ID NO: 13110 - DNA, 80 bp, synthetic construct
  misc_feature 1..80: note = Synthetic: >BetaSp-cand-4680-4759
  source 1..80: mol_type = other DNA
atggtaaagttgagaggtccttgtcctgtgggtgaatgttataaatccacaggtggaaaattgtgtaagttggtgcttaa

SEQ ID NO: 13111 - DNA, 80 bp, synthetic construct
  misc_feature 1..80: note = Synthetic: >BetaSp-cand-4760-4839
  source 1..80: mol_type = other DNA
tgttgttggtcctgatgcgcgagcacagggtaaacaatcttacgcgctacttgaacgcgtctataagacgtttaataaat

SEQ ID NO: 13112 - DNA, 80 bp, synthetic construct
  misc_feature 1..80: note = Synthetic: >BetaSp-cand-4840-4919
  source 1..80: mol_type = other DNA
atgaatgttgcgtcactacgttagtgtcagctggtatatttagtgtaccatctgatgtttcgttgacgtatttgttgggg

SEQ ID NO: 13113 - DNA, 80 bp, synthetic construct
  misc_feature 1..80: note = Synthetic: >BetaSp-cand-5000-5079
  source 1..80: mol_type = other DNA
cgatggtactaaacagttggctgctagattaactcaacagttgggtcgccagattaagtatgaaaccgatgcaagtatag

SEQ ID NO: 13114 - DNA, 80 bp, synthetic construct
  misc_feature 1..80: note = Synthetic: >BetaSp-cand-5160-5239
  source 1..80: mol_type = other DNA
ttggatgatgatgcccgagcttatgttcagagtatgtatcaatccttgccagaagattggcgatcagtcttcaaatatga

SEQ ID NO: 13115 - DNA, 80 bp, synthetic construct
  misc_feature 1..80: note = Synthetic: >BetaSp-cand-5320-5399
  source 1..80: mol_type = other DNA
gatatgtacaggagggtacctttgtaaaggctaccgtcaaagaggttcagcagctttttaggaatgcagttgaagtcctg

SEQ ID NO: 13116 - DNA, 80 bp, synthetic construct
  misc_feature 1..80: note = Synthetic: >CDPHE15-cand-13240-13319
  source 1..80: mol_type = other DNA
atcagagtgttttatgaaaagtgacatctttggtgaggattttaaatcctatgatttgttggaatatgattttactgccc

SEQ ID NO: 13117 - DNA, 80 bp, synthetic construct
  misc_feature 1..80: note = Synthetic: >CDPHE15-cand-13320-13399
  source 1..80: mol_type = other DNA
acaaacagtctctgtttgagaagtattttaaatactggggccaagagtatcatcccaactgtgtggattgtcatgatgat

SEQ ID NO: 13118 - DNA, 80 bp, synthetic construct
  misc_feature 1..80: note = Synthetic: >CDPHE15-cand-13400-13479
  source 1..80: mol_type = other DNA
ttatgtgtggtacactgtgcaaattttaatacattgttttctacaacaatacctaacactgcctttggaccactttgtag

SEQ ID NO: 13119 - DNA, 80 bp, synthetic construct
  misc_feature 1..80: note = Synthetic: >CDPHE15-cand-13480-13559
  source 1..80: mol_type = other DNA
aaagtgttggattgatggtgttccacttgttaccacagctggttatcattttaaacagcttggtatagtgtggaacaaag

SEQ ID NO: 13120 - DNA, 80 bp, synthetic construct
  misc_feature 1..80: note = Synthetic: >CDPHE15-cand-13560-13639
  source 1..80: mol_type = other DNA
atttcaacacacactctactagattgacaataaatgacttactgcggtttgttactgacccagcacttcttgttgcatcc

SEQ ID NO: 13121 - DNA, 80 bp, synthetic construct
  misc_feature 1..80: note = Synthetic: >CDPHE15-cand-13640-13719
  source 1..80: mol_type = other DNA
tcacctgcacttgttgaccaacgtaccgtttgcttttctgttgcggcacttagtactggtctagtcaaccaaactgttaa

SEQ ID NO: 13122 - DNA, 80 bp, synthetic construct
  misc_feature 1..80: note = Synthetic: >CDPHE15-cand-13720-13799
  source 1..80: mol_type = other DNA
accaggccattttaatgaggagttttataacttccttagaggccatggtttctttgaagaggggtctgagttgacactta

SEQ ID NO: 13123 - DNA, 80 bp, synthetic construct
  misc_feature 1..80: note = Synthetic: >CDPHE15-cand-13800-13879
  source 1..80: mol_type = other DNA
agcatttcttctttgctcagaaaggtgatgcagctgttaaagacttcgatttttaccgctataataagaccaccatgcta

SEQ ID NO: 13124 - DNA, 80 bp, synthetic construct
  misc_feature 1..80: note = Synthetic: >CDPHE15-cand-13880-13959
  source 1..80: mol_type = other DNA
gacatttgtcaagcacgcgttgtttataagctagtttctagatactttgagatctatgaaggtggctgtataactgcgaa

SEQ ID NO: 13125 - DNA, 80 bp, synthetic construct
  misc_feature 1..80: note = Synthetic: >CDPHE15-cand-13960-14039
  source 1..80: mol_type = other DNA
ggaggtggttgttaccaatttgaataagagtgctggttggcctcttaacaaaattggtaaagcaggtacttattatgagt

SEQ ID NO: 13126 - DNA, 80 bp, synthetic construct
  misc_feature 1..80: note = Synthetic: >CDPHE15-cand-14040-14119
  source 1..80: mol_type = other DNA
ctttgtcatatgaggaacaggatgagttatatgcgctcacaaagcgtaatatactccctactatgactcagctcaactta

SEQ ID NO: 13127 - DNA, 80 bp, synthetic construct
  misc_feature 1..80: note = Synthetic: >CDPHE15-cand-14120-14199
  source 1..80: mol_type = other DNA
aagtacgccatcagcggtaaagaaagagcacgtactgtcggaggtgtcgcattgttatcaactatgaccactaggcagtt

SEQ ID NO: 13128 - DNA, 80 bp, synthetic construct
  misc_feature 1..80: note = Synthetic: >CDPHE15-cand-14200-14279
  source 1..80: mol_type = other DNA
ccatcagaagcatcttaaatccatcgttaatactaggggtgccagtgttgtcattggcacaactaagttttatggtggtt

SEQ ID NO: 13129 - DNA, 80 bp, synthetic construct
  misc_feature 1..80: note = Synthetic: >CDPHE15-cand-14280-14359
  source 1..80: mol_type = other DNA
gggatgccatgcttaaaactcttatacatggtgttgaaaatcctcatctaatggggtgggactatccgaagtgtgataga

SEQ ID NO: 13130 - DNA, 80 bp, synthetic construct
  misc_feature 1..80: note = Synthetic: >CDPHE15-cand-14360-14439
  source 1..80: mol_type = other DNA
gctctacccaatatggtacggatgatttctgctatgatattgggttctaagcatgttacatgttgtactgctagtgatag

SEQ ID NO: 13131 - DNA, 80 bp, synthetic construct
  misc_feature 1..80: note = Synthetic: >CDPHE15-cand-14440-14519
  source 1..80: mol_type = other DNA
gtttttcagattggctaatgagctagcacaggttttgactgaggttgtctactctaatggtggtttttatctcaaacctg

SEQ ID NO: 13132 - DNA, 80 bp, synthetic construct
  misc_feature 1..80: note = Synthetic: >Delta-cand-80-159
  source 1..80: mol_type = other DNA
atcctaggtgcgtcttgccaccaagttggctacccttcctagggcgcgctttccctgccagcgcttgctcaccattaacc

SEQ ID NO: 13133 - DNA, 80 bp, synthetic construct
  misc_feature 1..80: note = Synthetic: >Delta-cand-160-239
  source 1..80: mol_type = other DNA
aaaaacagcctacagttcgttgtggagtttcggctgttgattgtctgtttggttcaacggggtcttactgtgttcataga

SEQ ID NO: 13134 - DNA, 80 bp, synthetic construct
  misc_feature 1..80: note = Synthetic: >Delta-cand-240-319
  source 1..80: mol_type = other DNA
actagatctacctggaaaccacagccatttaacatcaggttggagtttccccaggctcttttgtgtgggcattagcggct

SEQ ID NO: 13135 - DNA, 80 bp, synthetic construct
  misc_feature 1..80: note = Synthetic: >Delta-cand-320-399
  source 1..80: mol_type = other DNA
tgtggctttttgcacaaaatctaagctacttacatccgttcctctgaccatccaccacttctatagacagcactgcatta

SEQ ID NO: 13136 - DNA, 80 bp, synthetic construct
  misc_feature 1..80: note = Synthetic: >Delta-cand-400-479
  source 1..80: mol_type = other DNA
ccgtagggtttaagtcacaccggtctgcgcaccgcccgtcagcggacacatatacccagcatagcactctgacttgcacc

SEQ ID NO: 13137 - DNA, 80 bp, synthetic construct
  misc_feature 1..80: note = Synthetic: >Delta-cand-480-559
  source 1..80: mol_type = other DNA
gagcctaggtaggagccttgagaatttggctaaaaccccctaccgggtgactcttaaggcgtttcctccacgggatagga

SEQ ID NO: 13138 - DNA, 80 bp, synthetic construct
  misc_feature 1..80: note = Synthetic: >Delta-cand-560-639
  source 1..80: mol_type = other DNA
ccccactagtcactaggtgtaagtgatctgatctgagaaccctggcgtattgtgttgcgcaagtgtgatacccataggag

SEQ ID NO: 13139 - DNA, 80 bp, synthetic construct
  misc_feature 1..80: note = Synthetic: >Delta-cand-640-719
  source 1..80: mol_type = other DNA
cgtggaatcctattctgcggctcagtgcctgatatagctgtgacaatggccaagaacaagtccaatgtgcgcgacgctat

SEQ ID NO: 13140 - DNA, 80 bp, synthetic construct
  misc_feature 1..80: note = Synthetic: >Delta-cand-800-879
  source 1..80: mol_type = other DNA
accctaaggttactacttaccttggcaactataacctctatgccaccaaggctccgcctggcgtgcaggttcttagtgct

SEQ ID NO: 13141 - DNA, 80 bp, synthetic construct
  misc_feature 1..80: note = Synthetic: >Delta-cand-880-959
  source 1..80: mol_type = other DNA
aaaacctctcttactgactttgagaatgtctttggagctcaacccaccttgcgatcaattcgtaatctggtttgtgaggc

SEQ ID NO: 13142 - DNA, 80 bp, synthetic construct
  misc_feature 1..80: note = Synthetic: >Delta-cand-960-1039
  source 1..80: mol_type = other DNA
tcgctcggctgaatggacaacttccaagaatgcttttgcactcaaagccactcaacttgacgaattgtactctgatgccg

SEQ ID NO: 13143 - DNA, 80 bp, synthetic construct
  misc_feature 1..80: note = Synthetic: >Delta-cand-1040-1119
  source 1..80: mol_type = other DNA
ttttgagggcaatgattcgtttctgccctccaaaggtgtccacactcgctgcctttgctctttttggccgattggttaaa

SEQ ID NO: 13144 - DNA, 80 bp, synthetic construct
  misc_feature 1..80: note = Synthetic: >Delta-cand-1120-1199
  source 1..80: mol_type = other DNA
attgaggacaaggaacttgctgagttagctcgtgatactgcccttgagttggcgtacacggctaaaattggtacatctct

SEQ ID NO: 13145 - DNA, 80 bp, synthetic construct
  misc_feature 1..80: note = Synthetic: >Delta-cand-1200-1279
  source 1..80: mol_type = other DNA
tgctgacacgagatctgtctcacttattcataaggacgcttatctaactctcagtcagaatgaggttgttggcgtaactt

SEQ ID NO: 13146 - DNA, 80 bp, synthetic construct
  misc_feature 1..80: note = Synthetic: >Delta-cand-1280-1359
  source 1..80: mol_type = other DNA
ttactgccgcacttatggcaaaggctaccactgttaatggagcaacattgcaatactcaaacttttacctctaccctcgt

SEQ ID NO: 13147 - DNA, 80 bp, synthetic construct
  misc_feature 1..80: note = Synthetic: >Delta-cand-5200-5279
  source 1..80: mol_type = other DNA
ggtgtaaacctgtttcaaaacactgcttatcaacttagacctgctattgatgctctctatagggagtatctcaatggtaa

SEQ ID NO: 13148 - DNA, 80 bp, synthetic construct
  misc_feature 1..80: note = Synthetic: >Delta-cand-5280-5359
  source 1..80: mol_type = other DNA
tccaaatagatttgttgcttggatctacgcatccactaaccgtcgtgttggtgagatgggttgtccacagcaagttattt

SEQ ID NO: 13149 - DNA, 80 bp, synthetic construct
  misc_feature 1..80: note = Synthetic: >Delta-cand-5360-5439
  source 1..80: mol_type = other DNA
ctttgctcgttagtaactctgacgcagcattttcagcaactacagcctgttgtaacacctactttaaccacacaggtgtt

SEQ ID NO: 13150 - DNA, 80 bp, synthetic construct
  misc_feature 1..80: note = Synthetic: >Delta-cand-5440-5519
  source 1..80: mol_type = other DNA
atgtattcagtagctcgtgaatatgacccaatacaaccaaaggtctactgcatgaagtgtgatgtgtggactccctttac

SEQ ID NO: 13151 - DNA, 80 bp, synthetic construct
  misc_feature 1..80: note = Synthetic: >Delta-cand-5520-5599
  source 1..80: mol_type = other DNA
accccagagtggaaaaggtgcagttgcaattggtacttctgcagaaaaacatgaagaatacaaaacatctgaacctaccg

SEQ ID NO: 13152 - DNA, 80 bp, synthetic construct
  misc_feature 1..80: note = Synthetic: >Delta-cand-5600-5679
  source 1..80: mol_type = other DNA
gtcctgccattaaatttgccgcagctcactgctggtacactaatggcaagaaaacagttaatggctatgacactaaaggt

SEQ ID NO: 13153 - DNA, 80 bp, synthetic construct
  misc_feature 1..80: note = Synthetic: >Delta-cand-5680-5759
  source 1..80: mol_type = other DNA
gctaatgttgtagctacctatcataggtttgacgtgcctaagcctcaacttgtccagccacaagctacttctcagacatt

SEQ ID NO: 13154 - DNA, 80 bp, synthetic construct
  misc_feature 1..80: note = Synthetic: >Delta-cand-5760-5839
  source 1..80: mol_type = other DNA
aactaaccaaaaagttgatgttgctaaaaataataaaccccccaaacgagaggacgtggttgcgctgcctactaaaacta

SEQ ID NO: 13155 - DNA, 80 bp, synthetic construct
  misc_feature 1..80: note = Synthetic: >Delta-cand-5840-5919
  source 1..80: mol_type = other DNA
gaaatgactttgaagttctcaatgttgaagaactgccgcaggatagtgtgctccatttggacccacctcctaaacaggtt

SEQ ID NO: 13156 - DNA, 80 bp, synthetic construct
  misc_feature 1..80: note = Synthetic: >Delta-cand-5920-5999
  source 1..80: mol_type = other DNA
gtacaggccttacaacctaaggctaaccaacaaaacgttaatacaactgatgatggttgtcacattgagattctagaaaa

SEQ ID NO: 13157 - DNA, 80 bp, synthetic construct
  misc_feature 1..80: note = Synthetic: >Delta-cand-6160-6239
  source 1..80: mol_type = other DNA
ggtttgttaagtaaagctcttgactcaacaataaggttgtcagtcgatcttacctgtaaatttgttagaacggttctccc

SEQ ID NO: 13158 - DNA, 80 bp, synthetic construct
  misc_feature 1..80: note = Synthetic: >Delta-cand-6240-6319
  source 1..80: mol_type = other DNA
atcgtctaacactgtacacaaaacttgtcttggtctgtattattcagcccagacactttttgtttctttagcaccattcc

SEQ ID NO: 13159 - DNA, 80 bp, synthetic construct
  misc_feature 1..80: note = Synthetic: >Delta-cand-6320-6399
  source 1..80: mol_type = other DNA
ttatgttaccagctgtagttagtctgcttaattcaggctatacaattggcacatatttgtatgcaaaaactggctggcct

SEQ ID NO: 13160 - DNA, 80 bp, synthetic construct
  misc_feature 1..80: note = Synthetic: >Delta-cand-6400-6479
  source 1..80: mol_type = other DNA
tgtaattacaatgccacgcaagatgaagaagaaaaacactttgattataattcttactgtgcaggtgagcccttggtttg

SEQ ID NO: 13161 - DNA, 80 bp, synthetic construct
  misc_feature 1..80: note = Synthetic: >HKU10-cand-3870-3949
  source 1..80: mol_type = other DNA
cttagtggttgtgtgtttaggtttttacctacatctgaaccatttgcctatggtggctgtccatcttgtgataaacccct

SEQ ID NO: 13162 - DNA, 80 bp, synthetic construct
  misc_feature 1..80: note = Synthetic: >HKU10-cand-3950-4029
  source 1..80: mol_type = other DNA
tatgcacactataacatctatgcaaggtactggtgtgttttgccaagatcctaaagctgtggatgttactacgttgttgg

SEQ ID NO: 13163 - DNA, 80 bp, synthetic construct
  misc_feature 1..80: note = Synthetic: >HKU10-cand-4030-4109
  source 1..80: mol_type = other DNA
ttcaacctatgtgtgcttctgttttcattggcaattggtttaataactcgcttggtcattacaaaacaaacgtttatgac

SEQ ID NO: 13164 - DNA, 80 bp, synthetic construct
  misc_feature 1..80: note = Synthetic: >HKU10-cand-4110-4189
  source 1..80: mol_type = other DNA
aaggggttttgtgttgatggtaatggatcgtggcctatcactttgaacaccttgaacactatttgttacaaggatgtcaa

SEQ ID NO: 13165 - DNA, 80 bp, synthetic construct
  misc_feature 1..80: note = Synthetic: >HKU10-cand-4190-4269
  source 1..80: mol_type = other DNA
ttatgtaagaccacttcctgttgtgtctgatcaaccaattgttgaagagaaaagtgctaaacaagatcttaagcccgaat

SEQ ID NO: 13166 - DNA, 80 bp, synthetic construct
  misc_feature 1..80: note = Synthetic: >HKU10-cand-4270-4349
  source 1..80: mol_type = other DNA
taaaaccttttgctacttacaaaaatgttgagttttataagggtgagatatcggaccttgtgcaactcaaacatgacttt

SEQ ID NO: 13167 - DNA, 80 bp, synthetic construct
  misc_feature 1..80: note = Synthetic: >HKU10-cand-4350-4429
  source 1..80: mol_type = other DNA
gtggttaatgctgctaatgagaatttgagtcatggtggtggtgttgctgcagcaataaataatcttactaaaggtttgtt

SEQ ID NO: 13168 - DNA, 80 bp, synthetic construct
  misc_feature 1..80: note = Synthetic: >HKU10-cand-4430-4509
  source 1..80: mol_type = other DNA
acaaacgttgtcagaccattatgtgaagaaaaatggcaaaataaaagttggacagggtgttatgttacattgtggtaagg

SEQ ID NO: 13169 - DNA, 80 bp, synthetic construct
  misc_feature 1..80: note = Synthetic: >HKU10-cand-4510-4589
  source 1..80: mol_type = other DNA
aaaacgtcttgaatgttgttggaccacgtaaaggtaagcattcacctcaattgcttgagaaagcctacaagtttgtttta

SEQ ID NO: 13170 - DNA, 80 bp, synthetic construct
  misc_feature 1..80: note = Synthetic: >HKU10-cand-4590-4669
  source 1..80: mol_type = other DNA
aaacaaaaaggcacaccacttacaccacttcttagtgtaggtatctttaaagtacctattttggagtctgttacagcttt

SEQ ID NO: 13171 - DNA, 80 bp, synthetic construct
  misc_feature 1..80: note = Synthetic: >HKU10-cand-4670-4749
  source 1..80: mol_type = other DNA
aaaaaatgtcgttggtgaccgtcatgttaaatgtttttgttactcagctgcagaagtttctgagatacagaaatgtcttg

SEQ ID NO: 13172 - DNA, 80 bp, synthetic construct
  misc_feature 1..80: note = Synthetic: >HKU10-cand-4750-4829
  source 1..80: mol_type = other DNA
acaatcttactaatgtgactccgttagatgtggttgaacctaaaatggaagtcgcaccacaaattgaatctgagacggtt

SEQ ID NO: 13173 - DNA, 80 bp, synthetic construct
  misc_feature 1..80: note = Synthetic: >HKU10-cand-4830-4909
  source 1..80: mol_type = other DNA
atatctgtgtcacaaaacacagaacaacaagcattttcacatgtggatagaagggaacttaaaccttgcagagttgaggg

SEQ ID NO: 13174 - DNA, 80 bp, synthetic construct
  misc_feature 1..80: note = Synthetic: >HKU10-cand-4900-4979
  source 1..80: mol_type = other DNA
gagttgagggtaagttttcgttttatgattgtcctattgctgacattgctatcacagaacctgagagagttgtcttcttt

SEQ ID NO: 13175 - DNA, 80 bp, synthetic construct
  misc_feature 1..80: note = Synthetic: >HKU10-cand-4980-5059
  source 1..80: mol_type = other DNA
acagatgtcaaacttagtttttgtgaggcagcaaaagcattagacaaacattatgaaggtgctttgactagctgtgtaca

SEQ ID NO: 13176 - DNA, 80 bp, synthetic construct
  misc_feature 1..80: note = Synthetic: >HKU10-cand-5060-5139
  source 1..80: mol_type = other DNA
ggcctatttagctgaaacaccattgattcctgctggtaatttgttaactttgaagtgtgaaggtgccattcctgttagtt

SEQ ID NO: 13177 - DNA, 80 bp, synthetic construct
  misc_feature 1..80: note = Synthetic: >HKU14-cand-17070-17149
  source 1..80: mol_type = other DNA
tcaattatcaacacattggaatgaaacgttattgtaccgtgcaaggaccccctggaacagggaagtcacatcttgctatc

SEQ ID NO: 13178 - DNA, 80 bp, synthetic construct
  misc_feature 1..80: note = Synthetic: >HKU14-cand-17150-17229
  source 1..80: mol_type = other DNA
ggtttggctgtatattattgtacagcaagagttgtatatactgctgccagccatgctgctgttgatgcattatgtgaaaa

SEQ ID NO: 13179 - DNA, 80 bp, synthetic construct
  misc_feature 1..80: note = Synthetic: >HKU14-cand-17230-17309
  source 1..80: mol_type = other DNA
ggcatataaatttttaaatattaatgactgcacgcgtattgttcctgctaaggtgcgtgtggattgctatgataaattta

SEQ ID NO: 13180 - DNA, 80 bp, synthetic construct
  misc_feature 1..80: note = Synthetic: >HKU14-cand-17310-17389
  source 1..80: mol_type = other DNA
agattaatgacacttctcgtaagtatgtgtttactaccataaatgcattacctgagatggtgactgatattgttgttgta

SEQ ID NO: 13181 - DNA, 80 bp, synthetic construct
  misc_feature 1..80: note = Synthetic: >HKU14-cand-17390-17469
  source 1..80: mol_type = other DNA
gatgaagtaagtatgcttaccaattacgagctatctgttatcaacgctcgtattcgtgctaagcattatgtctatattgg

SEQ ID NO: 13182 - DNA, 80 bp, synthetic construct
  misc_feature 1..80: note = Synthetic: >HKU14-cand-17470-17549
  source 1..80: mol_type = other DNA
tgaccctgctcagttgccagcaccccgtgtgttattgagtaaaggatccctagaacctaaatattttaatactgtaacta

SEQ ID NO: 13183 - DNA, 80 bp, synthetic construct
  misc_feature 1..80: note = Synthetic: >HKU14-cand-17550-17629
  source 1..80: mol_type = other DNA
agctaatgtgttgcttaggtcctgatattttcttgggaacatgctatcgctgtcctaaggaaattgtggatacagtatca

SEQ ID NO: 13184 - DNA, 80 bp, synthetic construct
  misc_feature 1..80: note = Synthetic: >HKU14-cand-17630-17709
  source 1..80: mol_type = other DNA
gccttggtttatgataataagctcaaggctaagaatgaaaatagctcattgtgttttaaggtctattttaagggcgttac

SEQ ID NO: 13185 - DNA, 80 bp, synthetic construct
  misc_feature 1..80: note = Synthetic: >HKU14-cand-17710-17789
  source 1..80: mol_type = other DNA
aacacatgagagttctagcgctgttaatatgcagcagatttatttaattagtaaatttttgaaggctaatccattgtggc

SEQ ID NO: 13186 - DNA, 80 bp, synthetic construct
  misc_feature 1..80: note = Synthetic: >HKU14-cand-17790-17869
  source 1..80: mol_type = other DNA
ataacgccgtttttattagcccttataatagtcagaactttgctgctaaacgcgttttgggtcttcagactcaaaccgtt

SEQ ID NO: 13187 - DNA, 80 bp, synthetic construct
  misc_feature 1..80: note = Synthetic: >HKU14-cand-17870-17949
  source 1..80: mol_type = other DNA
gattcagcgcaagggtctgaatatgattatgtcatttattcacagactgcggaaacagcgcattctgttaatgttaatcg

SEQ ID NO: 13188 - DNA, 80 bp, synthetic construct
  misc_feature 1..80: note = Synthetic: >HKU14-cand-17950-18029
  source 1..80: mol_type = other DNA
cttcaatgtagctattaccagggccaagaaaggtattctttgtgtcatgtgtaatatgcaactctttgaggctttacaat

SEQ ID NO: 13189 - DNA, 80 bp, synthetic construct
  misc_feature 1..80: note = Synthetic: >HKU14-cand-18030-18109
  source 1..80: mol_type = other DNA
ttacagcactgactttggataaagttccttccaaattgcagtgtactaccaatttattcaaagattgtagcaagagctat

SEQ ID NO: 13190 - DNA, 80 bp, synthetic construct
  misc_feature 1..80: note = Synthetic: >HKU14-cand-18110-18189
  source 1..80: mol_type = other DNA
attggttaccatccagctcatgctccttcatttttagcagtggatgaaaaatacaaggtaaatggtgatttggccgtttg

SEQ ID NO: 13191 - DNA, 80 bp, synthetic construct
  misc_feature 1..80: note = Synthetic: >HKU14-cand-18190-18269
  source 1..80: mol_type = other DNA
ccttggagtaggtgattcctctgtaacatattctagactaatatcactcatgggttttaagttagatctgacacttgagg

SEQ ID NO: 13192 - DNA, 80 bp, synthetic construct
  misc_feature 1..80: note = Synthetic: >HKU14-cand-18270-18349
  source 1..80: mol_type = other DNA
gatattgtaagctatttattacaaaagaagaggctgttaaacgtgttagagcttgggtcggcttcgacgctgaaggtgcc

SEQ ID NO: 13193 - DNA, 80 bp, synthetic construct
  misc_feature 1..80: note = Synthetic: >HKU2-cand-22160-22239
  source 1..80: mol_type = other DNA
gcacgacactacttacgtagcacctgttactaatgagaggtacacagaaatgccattggaccatcaattaattttgaccg

SEQ ID NO: 13194 - DNA, 80 bp, synthetic construct
  misc_feature 1..80: note = Synthetic: >HKU2-cand-22240-22319
  source 1..80: mol_type = other DNA
aacagtttttgcaaactacaatgcctaagttcagcgttagttgcgagacttacatatgtgacgtaagtaaggcgtgcaaa

SEQ ID NO: 13195 - DNA, 80 bp, synthetic construct
  misc_feature 1..80: note = Synthetic: >HKU2-cand-22480-22559
  source 1..80: mol_type = other DNA
tctttttgcctaaaacgcagtctggcagtgccaataagtccttatgaatctaggtctgctattgaggacttgttattcag

SEQ ID NO: 13196 - DNA, 80 bp, synthetic construct
  misc_feature 1..80: note = Synthetic: >HKU2-cand-22560-22639
  source 1..80: mol_type = other DNA
caaaattgaaactactggcccaggcttttacggtgactattataactgtaagaaaaatgctatacaagaccttacttgtg

SEQ ID NO: 13197 - DNA, 80 bp, synthetic construct
  misc_feature 1..80: note = Synthetic: >HKU2-cand-22640-22719
  source 1..80: mol_type = other DNA
ctcagtaccataatggtatacttgttataccacctattatggatgctgagacgttaggcatgtatggcgggattgctgct

SEQ ID NO: 13198 - DNA, 80 bp, synthetic construct
  misc_feature 1..80: note = Synthetic: >HKU2-cand-23120-23199
  source 1..80: mol_type = other DNA
ttgctgagctgcgtaacacacatcgttatgtgcaatctcttattaatgaatgtgtttatgctcagagtttaagaaatggt

SEQ ID NO: 13199 - DNA, 80 bp, synthetic construct
  misc_feature 1..80: note = Synthetic: >HKU31-cand-5420-5499
  source 1..80: mol_type = other DNA
aattgtacatatggacaaccagatgatgcatccatgcttcttcacacagccctatctaaagcagaacttttagtatctgc

SEQ ID NO: 13200 - DNA, 80 bp, synthetic construct
  misc_feature 1..80: note = Synthetic: >HKU31-cand-5500-5579
  source 1..80: mol_type = other DNA
gcgtatggtgtggcgtgagtggtgtgaccattgtggtgttaaggatgttgtaataactggtattaaggcctgtgtctatg

SEQ ID NO: 13201 - DNA, 80 bp, synthetic construct
  misc_feature 1..80: note = Synthetic: >HKU31-cand-5580-5659
  source 1..80: mol_type = other DNA
taggagtgcaatctctagaggagttaagagattgcaatcattatatttgccagtgtggtggtgttcgattcagacaatta

SEQ ID NO: 13202 - DNA, 80 bp, synthetic construct
  misc_feature 1..80: note = Synthetic: >HKU31-cand-5660-5739
  source 1..80: mol_type = other DNA
gtagaatgtgtaacaccctggcttttattatctgggcctccaaatgaggaattggttgcgaatccagattttgtggcttt

SEQ ID NO: 13203 - DNA, 80 bp, synthetic construct
  misc_feature 1..80: note = Synthetic: >HKU31-cand-5740-5819
  source 1..80: mol_type = other DNA
taacgtctttatagggcatgaggcaggtgttggacactatgtgcatgctcgtgtaaaaaaaggattgttatataagtatg

SEQ ID NO: 13204 - DNA, 80 bp, synthetic construct
  misc_feature 1..80: note = Synthetic: >HKU31-cand-5820-5899
  source 1..80: mol_type = other DNA
attctggtactttaactaaggcctcagattggaagtgtaaagttaccgataagttatatccaggccagaagtatacagca

SEQ ID NO: 13205 - DNA, 80 bp, synthetic construct
  misc_feature 1..80: note = Synthetic: >HKU31-cand-5900-5979
  source 1..80: mol_type = other DNA
gaatgtgaaatcgttgtatattctttggatggtaatcagaaagctgaaaaacaaccagatttttcaacttattatgttaa

SEQ ID NO: 13206 - DNA, 80 bp, synthetic construct
  misc_feature 1..80: note = Synthetic: >HKU31-cand-5980-6059
  source 1..80: mol_type = other DNA
agatggcaagtattatactaataaaccatctttggagtttacaccagcgacagtagctagtggtgttgtttataccaata

SEQ ID NO: 13207 - DNA, 80 bp, synthetic construct
  misc_feature 1..80: note = Synthetic: >HKU31-cand-6060-6139
  source 1..80: mol_type = other DNA
gttgtttcattgctaaagatgatgatactattggtactgcttttaataaacttttagggttcgataaaaataaacctgca

SEQ ID NO: 13208 - DNA, 80 bp, synthetic construct
  misc_feature 1..80: note = Synthetic: >HKU31-cand-6140-6219
  source 1..80: mol_type = other DNA
tctaaacaattaacatattcattgcttcctaatgaggatggtgatgttttattagctgagtttaagttttatgatcccat

SEQ ID NO: 13209 - DNA, 80 bp, synthetic construct
  misc_feature 1..80: note = Synthetic: >HKU31-cand-6220-6299
  source 1..80: mol_type = other DNA
gtataaaaatggtgctgcgtataagggcaagcccattttgtgggtgaataatggtttatatgatagcaagcttaataagt

SEQ ID NO: 13210 - DNA, 80 bp, synthetic construct
  misc_feature 1..80: note = Synthetic: >HKU31-cand-6300-6379
  source 1..80: mol_type = other DNA
ataacagagcttcgttacgtcaagtatttgacgtacagcctgttgaaactaataataggtttgcagcacttaaagtagaa

SEQ ID NO: 13211 - DNA, 80 bp, synthetic construct
  misc_feature 1..80: note = Synthetic: >HKU31-cand-6380-6459
  source 1..80: mol_type = other DNA
gaggttgatgaaaaacctacttcccatgttcaagaagagaacatagtgtctgagaaaagtgagctaaagattgttaagtg

SEQ ID NO: 13212 - DNA, 80 bp, synthetic construct
  misc_feature 1..80: note = Synthetic: >HKU31-cand-6460-6539
  source 1..80: mol_type = other DNA
caaaggtctttctaaaccatttgttaaaaacggctttagctttatttcagatgataaaggtattctaacagtagaatatc

SEQ ID NO: 13213 - DNA, 80 bp, synthetic construct
  misc_feature 1..80: note = Synthetic: >HKU31-cand-6540-6619
  source 1..80: mol_type = other DNA
ttacaaaggaagatatgcatactttgtatgtgaatcctaagagccaaataatagttttaaaagataactggttgtctggc

SEQ ID NO: 13214 - DNA, 80 bp, synthetic construct
  misc_feature 1..80: note = Synthetic: >HKU31-cand-6620-6699
  source 1..80: mol_type = other DNA
ttattccagatgcacactgtacagagtggtgatctaaatgttgtagcatcttcaggttctttaacgaagaaagttaagct

SEQ ID NO: 13215 - DNA, 80 bp, synthetic construct
  misc_feature 1..80: note = Synthetic: >HKU31-cand-13090-13169
  source 1..80: mol_type = other DNA
tttaatagcaggtagtaaaggtcctgaagttaggtatttgtattttgttaaaaatttgaataatttgcatagaggtcagc

SEQ ID NO: 13216 - DNA, 80 bp, synthetic construct
  misc_feature 1..80: note = Synthetic: >HKU31-cand-13170-13249
  source 1..80: mol_type = other DNA
tattgggacatatagctgccactgttagattacaagctggttctaatacagaatatgcttcaaattcatcagtattgtca

SEQ ID NO: 13217 - DNA, 80 bp, synthetic construct
  misc_feature 1..80: note = Synthetic: >HKU31-cand-13250-13329
  source 1..80: mol_type = other DNA
ttagtaaactttgctgtggatcctgctaaagcttacacagattatgttaatgctggtggtacaccgttaacaaattgtgt

SEQ ID NO: 13218 - DNA, 80 bp, synthetic construct
  misc_feature 1..80: note = Synthetic: >HKU31-cand-13330-13409
  source 1..80: mol_type = other DNA
aaagatgttaactcctaaaacaggtacaggcatagccatatctgttaaaccagagagtaatttagaccaagaaacttatg

SEQ ID NO: 13219 - DNA, 80 bp, synthetic construct
  misc_feature 1..80: note = Synthetic: >HKU31-cand-13410-13489
  source 1..80: mol_type = other DNA
gcggagcttcagtttgtttatattgtcgtgcacatatagaacatcctgatgtatctggcgtttgtaagtttaaaggcaag

SEQ ID NO: 13220 - DNA, 80 bp, synthetic construct
  misc_feature 1..80: note = Synthetic: >HKU31-cand-13490-13569
  source 1..80: mol_type = other DNA
tttgtgcaaatacctgcacagtgtacacgtgaccctgtaggtttttgtttggcaaatgtgcagtgtaatgtctgtcaata

SEQ ID NO: 13221 - DNA, 80 bp, synthetic construct
  misc_feature 1..80: note = Synthetic: >HKU31-cand-13570-13649
  source 1..80: mol_type = other DNA
ttgggttggttatggttgcaattgtgattctcttagagaaaacactatgctccattccaaagatactaattttttaaacg

SEQ ID NO: 13222 - DNA, 80 bp, synthetic construct
  misc_feature 1..80: note = Synthetic: >HKU31-cand-13650-13729
  source 1..80: mol_type = other DNA
agtcaggggttctattgtaaatgcccgaatagaaccctgtgcaagtggtcttgccactgatgtcgtttatagggcatttg

SEQ ID NO: 13223 - DNA, 80 bp, synthetic construct
  misc_feature 1..80: note = Synthetic: >HKU31-cand-13730-13809
  source 1..80: mol_type = other DNA
acatctgcaactataaggcaagagttgctggtataggaaaacactacaagacgaatacttgtaggtttgttgaactagat

SEQ ID NO: 13224 - DNA, 80 bp, synthetic construct
  misc_feature 1..80: note = Synthetic: >HKU31-cand-13810-13889
  source 1..80: mol_type = other DNA
gaccaaggtcataagttagactcatatttcgtagtcaaaagacatacgatggagaattatgagttggaaaagcattgcta

SEQ ID NO: 13225 - DNA, 80 bp, synthetic construct
  misc_feature 1..80: note = Synthetic: >HKU31-cand-13890-13969
  source 1..80: mol_type = other DNA
cgatttgctaaaagattgtgattcagtagcagcgcatgattttttcgtgtttgatgtagataaaattaaaacaccacata

SEQ ID NO: 13226 - DNA, 80 bp, synthetic construct
  misc_feature 1..80: note = Synthetic: >HKU31-cand-13970-14049
  source 1..80: mol_type = other DNA
tagtccgtcagcgtttaacagagtatacaatgatggatcttgtttatgcacttcgtcattttgatcagaacaattgtgaa

SEQ ID NO: 13227 - DNA, 80 bp, synthetic construct
  misc_feature 1..80: note = Synthetic: >HKU31-cand-14050-14129
  source 1..80: mol_type = other DNA
gtgcttaaaaccatattagtgaagtatggttgttgtgaagaatcatactttgataataagctctggtttgattttgttga

SEQ ID NO: 13228 - DNA, 80 bp, synthetic construct
  misc_feature 1..80: note = Synthetic: >HKU31-cand-14130-14209
  source 1..80: mol_type = other DNA
aaacccagatgtaatacgtgtttaccataagctcggtgagttagtcagaagagctatgctaagcactgttaaattttgcg

SEQ ID NO: 13229 - DNA, 80 bp, synthetic construct
  misc_feature 1..80: note = Synthetic: >HKU31-cand-14210-14289
  source 1..80: mol_type = other DNA
accacatggttaagagtggtctagtgggtgttttaacacttgataaccaagatctaaatggaaaatggtatgattttggt

SEQ ID NO: 13230 - DNA, 80 bp, synthetic construct
  misc_feature 1..80: note = Synthetic: >HKU31-cand-14290-14369
  source 1..80: mol_type = other DNA
gattttgtagtaacccagccaggtgctggagtagctatagtagatagttattattcatatttaatgcctgtgttgtctat

SEQ ID NO: 13231 - DNA, 80 bp, synthetic construct
  misc_feature 1..80: note = Synthetic: >HKU31-cand-18280-18359
  source 1..80: mol_type = other DNA
gcatatgcaccaacgtatatgagtgtagatgaaaaatttaagactaatgatgagctttgtgtgaatttgaatatacccac

SEQ ID NO: 13232 - DNA, 80 bp, synthetic construct
  misc_feature 1..80: note = Synthetic: >HKU4-cand-30150-30229
  source 1..80: mol_type = other DNA
ttagtgtaatgtgtaactatagagagtaatttaaagactgtcacctctgcgtgattgcaagtgaacagtgcccctgtgga

SEQ ID NO: 13233 - DNA, 80 bp, synthetic construct
  misc_feature 1..80: note = Synthetic: >HKU4-cand-30230-30309
  source 1..80: mol_type = other DNA
agagctctatagtgtaaagtgtaaataaaaatagctattattcaattagattaggcttaatagatgattaacaaaaaaaa

SEQ ID NO: 13234 - DNA, 80 bp, synthetic construct
  misc_feature 1..80: note = Synthetic: >HKU5-cand-80-159
  source 1..80: mol_type = other DNA
taaataatagccctgctggtttgcgtgctgcgatacctttctgctgcgtcataggcgccggactggaaagcgcatgtaca

SEQ ID NO: 13235 - DNA, 80 bp, synthetic construct
  misc_feature 1..80: note = Synthetic: >HKU5-cand-160-239
  source 1..80: mol_type = other DNA
ccactgggtacaattaaaactgaataatatttttcagttagagcatcgtgtctcaagtgcttcacggtcacaatataccg

SEQ ID NO: 13236 - DNA, 80 bp, synthetic construct
  misc_feature 1..80: note = Synthetic: >HKU5-cand-640-719
  source 1..80: mol_type = other DNA
tgcagggtaagcgtgttggaatgttcttcccatttgatgcagatcttgttactggagagttccaatttctgcttcgtaag

SEQ ID NO: 13237 - DNA, 80 bp, synthetic construct
  misc_feature 1..80: note = Synthetic: >HKU5-cand-720-799
  source 1..80: mol_type = other DNA
aagggcttcggtggcaatcgcttccgtgatgccccttgggattacaactggactccctactctgatcttatggacgctct

SEQ ID NO: 13238 - DNA, 80 bp, synthetic construct
  misc_feature 1..80: note = Synthetic: >HKU5-cand-880-959
  source 1..80: mol_type = other DNA
acatgtgtggcaaaaacggcaagcctattgctgaatttgctgctttaatggctagcgaaggaatcaccaagctagctgat

SEQ ID NO: 13239 - DNA, 80 bp, synthetic construct
  misc_feature 1..80: note = Synthetic: >HKU5-cand-960-1039
  source 1..80: mol_type = other DNA
gtggaggccgaagtcaagtcccgtactgactctgaccgctacatcgtcctcaagaacaaattgtaccggattgtgtggaa

SEQ ID NO: 13240 - DNA, 80 bp, synthetic construct
  misc_feature 1..80: note = Synthetic: >HKU9-cand-18080-18159
  source 1..80: mol_type = other DNA
atttgataccacttatgcgtaagggcgagccttggagtatcgtccgtaagcgtatagtggaaatgctttgtgatacacta

SEQ ID NO: 13241 - DNA, 80 bp, synthetic construct
  misc_feature 1..80: note = Synthetic: >HKU9-cand-18160-18239
  source 1..80: mol_type = other DNA
gatggtgttagtgacactgttacatttgtgacatgggcacatggatttgaactcacaaccctgcattacttcgctaaagt

SEQ ID NO: 13242 - DNA, 80 bp, synthetic construct
  misc_feature 1..80: note = Synthetic: >HKU9-cand-18240-18319
  source 1..80: mol_type = other DNA
gggacctgagcgtaaatgctttatgtgtcctaagcgtgcaaccttatttagtagtgtttatggggcatattcatgctgga

SEQ ID NO: 13243 - DNA, 80 bp, synthetic construct
  misc_feature 1..80: note = Synthetic: >HKU9-cand-18320-18399
  source 1..80: mol_type = other DNA
gtcaccatagacacataggaggtgcagactttgtgtataacccatttttggtggatgtacagcaatggggttatgtaggt

SEQ ID NO: 13244 - DNA, 80 bp, synthetic construct
  misc_feature 1..80: note = Synthetic: >HKU9-cand-18400-18479
  source 1..80: mol_type = other DNA
aatttacaggtaaaccatgataatgtctgcgatgtccataagggtgcacatgtggctagctgtgatgccataatgactag

SEQ ID NO: 13245 - DNA, 80 bp, synthetic construct
  misc_feature 1..80: note = Synthetic: >HKU9-cand-18480-18559
  source 1..80: mol_type = other DNA
atgtttggctatccatgactgtttttgtggtgaagtcaattgggatgtggagtaccctattatagctaatgagttagcta

SEQ ID NO: 13246 - DNA, 80 bp, synthetic construct
  misc_feature 1..80: note = Synthetic: >HKU9-cand-18560-18639
  source 1..80: mol_type = other DNA
taaataaggcatgtcgtagtgtgcagcgagtcgtgttgaaagccgctgttaaggcactacatatagatactatttatgat

SEQ ID NO: 13247 - DNA, 80 bp, synthetic construct
  misc_feature 1..80: note = Synthetic: >HKU9-cand-18640-18719
  source 1..80: mol_type = other DNA
attggcaaccctaaggctattaaagtctatggtgtcaatgtaaataattggcaattctatgacactaagcctgtcgtaga

SEQ ID NO: 13248 - DNA, 80 bp, synthetic construct
  misc_feature 1..80: note = Synthetic: >HKU9-cand-18720-18799
  source 1..80: mol_type = other DNA
aggtgttaagcagttacattatgtgtatgatgtacataaagaccagttcaaagatgggctggctatgttttggaattgca

SEQ ID NO: 13249 - DNA, 80 bp, synthetic construct
  misc_feature 1..80: note = Synthetic: >HKU9-cand-18800-18879
  source 1..80: mol_type = other DNA
atgtggattgttatccacacaacgcattggtctgtagatttgacacacgtgtgttgtcaaaattaaacttagcagggtgc

SEQ ID NO: 13250 - DNA, 80 bp, synthetic construct
  misc_feature 1..80: note = Synthetic: >HKU9-cand-18880-18959
  source 1..80: mol_type = other DNA
aatggtggctcgctttatgtgaaccaacatgcatttcatactgatgcatttaataaaaatgcttttgttaatttgaaacc

SEQ ID NO: 13251 - DNA, 80 bp, synthetic construct
  misc_feature 1..80: note = Synthetic: >HKU9-cand-18960-19039
  source 1..80: mol_type = other DNA
actcccattcttctactattcagatacagcatgtgaaaatgccactggtgtgtctactaattatgtcagtgaagtagatt

SEQ ID NO: 13252 - DNA, 80 bp, synthetic construct
  misc_feature 1..80: note = Synthetic: >HKU9-cand-19040-19119
  source 1..80: mol_type = other DNA
atgtaccccttaagtcaaacgtttgtataacacgttgtaatttaggtggtgcagtttgtaaaaagcatgctgacgagtac

SEQ ID NO: 13253 - DNA, 80 bp, synthetic construct
  misc_feature 1..80: note = Synthetic: >HKU9-cand-19120-19199
  source 1..80: mol_type = other DNA
agaaattttctggaaagttataatactatggtaagcgcaggtttcaccctgtgggtagataaaacctttgacgtttttaa

SEQ ID NO: 13254 - DNA, 80 bp, synthetic construct
  misc_feature 1..80: note = Synthetic: >HKU9-cand-19200-19279
  source 1..80: mol_type = other DNA
tttgtggtctacgtttgtaaagctacagtctttggagaatgtggcttacaatgtattaaaatctggacattttacagcag

SEQ ID NO: 13255 - DNA, 80 bp, synthetic construct
  misc_feature 1..80: note = Synthetic: >HKU9-cand-19280-19359
  source 1..80: mol_type = other DNA
tagcaggtgagttacctgtagctattcttaatgaccgcctctatataaaggaggacggtgttgataaattgttatttact

SEQ ID NO: 13256 - DNA, 80 bp, synthetic construct
  misc_feature 1..80: note = Synthetic: >HKU9-cand-23210-23289
  source 1..80: mol_type = other DNA
atgacccaacggctgaaaatgctacagttaaggttctgacaccagtttactgggttagtatacccactaattttactctg

SEQ ID NO: 13257 - DNA, 80 bp, synthetic construct
  misc_feature 1..80: note = Synthetic: >HKU9-cand-23290-23369
  source 1..80: mol_type = other DNA
gctgctacttctgagtacatacaaactacctcacctaagatcaatgtagattgcgcgaaatatttgtgtggcgattctga

SEQ ID NO: 13258 - DNA, 80 bp, synthetic construct
  misc_feature 1..80: note = Synthetic: >HKU9-cand-23370-23449
  source 1..80: mol_type = other DNA
tcggtgtatgactgtgttgctgcagtatggcacattttgtgatgacgttaataaggcgctgtcagaggtcagtgctataa

SEQ ID NO: 13259 - DNA, 80 bp, synthetic construct
  misc_feature 1..80: note = Synthetic: >HKU9-cand-23450-23529
  source 1..80: mol_type = other DNA
ttgacgcttccgttgtatcactaatgtcagagattacatctgacgttgtacgtaatgaaaatacatttcattttgacact

SEQ ID NO: 13260 - DNA, 80 bp, synthetic construct
  misc_feature 1..80: note = Synthetic: >HKU9-cand-23530-23609
  source 1..80: mol_type = other DNA
acctataactttactggacttatgggttgtttaggttctaattgtgatgcccgtaaaacgtacaggtctgctctttctga

SEQ ID NO: 13261 - DNA, 80 bp, synthetic construct
  misc_feature 1..80: note = Synthetic: >HKU9-cand-23610-23689
  source 1..80: mol_type = other DNA
cttgttatataataaggtcaaagtcacggaccctggctttatgcagtcttatcagaagtgtatagattctcagtggggtg

SEQ ID NO: 13262 - DNA, 80 bp, synthetic construct
  misc_feature 1..80: note = Synthetic: >HKU9-cand-23690-23769
  source 1..80: mol_type = other DNA
gtgaaatcagagatcttatgtgtactcaaacctttaatggtatcgctgttttaccacctattgtttcaccaggcatgcaa

SEQ ID NO: 13263 - DNA, 80 bp, synthetic construct
  misc_feature 1..80: note = Synthetic: >HKU9-cand-23770-23849
  source 1..80: mol_type = other DNA
gccttgtacacatcattacttgtgggtgctgtagcatctgctggttatacatttggtattacttctgtaggcgttatacc

SEQ ID NO: 13264 - DNA, 80 bp, synthetic construct
  misc_feature 1..80: note = Synthetic: >HKU9-cand-23850-23929
  source 1..80: mol_type = other DNA
ttttgccactcagttgcaatttagattaaatggtataggtgttactacacaggtgctggtggagaatcagaaacttattg

SEQ ID NO: 13265 - DNA, 80 bp, synthetic construct
  misc_feature 1..80: note = Synthetic: >HKU9-cand-23930-24009
  source 1..80: mol_type = other DNA
ctaattcttttaataatgcccttactaatatacagaagggttttgatgccactaatgaggcacttagtaagatgcagcct

SEQ ID NO: 13266 - DNA, 80 bp, synthetic construct
  misc_feature 1..80: note = Synthetic: >HKU9-cand-24010-24089
  source 1..80: mol_type = other DNA
gttattaaccagcatgctcagcaattgcagactttggttaaacagttaggtaattcatttggtgctatttcttcttctat

SEQ ID NO: 13267 - DNA, 80 bp, synthetic construct
  misc_feature 1..80: note = Synthetic: >HKU9-cand-24090-24169
  source 1..80: mol_type = other DNA
taatgaaatttttagtcgtttagatggtttagaagctgatgctcaagtggatagacttattaatggacgcatggttgtgc

SEQ ID NO: 13268 - DNA, 80 bp, synthetic construct
  misc_feature 1..80: note = Synthetic: >HKU9-cand-24170-24249
  source 1..80: mol_type = other DNA
ttaatacttatgtaacacagctgctaattaaagcttcagaagtgcgggctcaggccctgctagctaagcagaaaattagt

SEQ ID NO: 13269 - DNA, 80 bp, synthetic construct
  misc_feature 1..80: note = Synthetic: >HKU9-cand-24250-24329
  source 1..80: mol_type = other DNA
gagtgcgttaaagcacaatctcttcgtaatgacttctgtggtaatggcacacatgtgttttctataccacagttagctcc

SEQ ID NO: 13270 - DNA, 80 bp, synthetic construct
  misc_feature 1..80: note = Synthetic: >HKU9-cand-24330-24409
  source 1..80: mol_type = other DNA
taatggtattatgtttttgcattatacctataaaccgacagcttatgctgttgtgcaaactgctgctggtctgtgttata

SEQ ID NO: 13271 - DNA, 80 bp, synthetic construct
  misc_feature 1..80: note = Synthetic: >HKU9-cand-24410-24489
  source 1..80: mol_type = other DNA
atggcacagggtatgcacctggaggtggtatgtttgtgttacctaatggtactaattactggcactttactaaaatgaat

SEQ ID NO: 13272 - DNA, 80 bp, synthetic construct
  misc_feature 1..80: note = Synthetic: >HKU9-cand-28370-28449
  source 1..80: mol_type = other DNA
tgtcgtagatgctgacattggtacttacaacaggtttacgcttgtggacccctttgatcactatgtttgtagaaataagt

SEQ ID NO: 13273 - DNA, 80 bp, synthetic construct
  misc_feature 1..80: note = Synthetic: >HKU9-cand-28450-28529
  source 1..80: mol_type = other DNA
ctgtgaatagcacttaagactacaaaggttggggcgcacgttatggtgaggcttttgtcttcctgttttaaaaataaata

SEQ ID NO: 13274 - DNA, 80 bp, synthetic construct
  misc_feature 1..80: note = Synthetic: >HKU9-cand-28530-28609
  source 1..80: mol_type = other DNA
tgagtctcgttgttttaggctagaggatccggtgttgaaaccatggacgttgtcaatacccagctgtttacaggggtggt

SEQ ID NO: 13275 - DNA, 80 bp, synthetic construct
  misc_feature 1..80: note = Synthetic: >HKU9-cand-28610-28689
  source 1..80: mol_type = other DNA
ttagtgcagcgcctttgtgtgcgctttaaagtacctacctgcgtgtgtcttccatgttgggtacgcaggtatacatttac

SEQ ID NO: 13276 - DNA, 80 bp, synthetic construct
  misc_feature 1..80: note = Synthetic: >HKU9-cand-28690-28769
  source 1..80: mol_type = other DNA
aggcttgggctatgtgacattactgtgggacgacattttccggccctagactatgcaacttacaactaattggagcatgg

SEQ ID NO: 13277 - DNA, 80 bp, synthetic construct
  misc_feature 1..80: note = Synthetic: >HKU9-cand-28770-28849
  source 1..80: mol_type = other DNA
aagttcacctgttaacggtacaaccgctagcaagcactattatcccacacagcagggtgttatagccaggcctattaaag

SEQ ID NO: 13278 - DNA, 80 bp, synthetic construct
  misc_feature 1..80: note = Synthetic: >HKU9-cand-28850-28929
  source 1..80: mol_type = other DNA
atgaactctaaggaacgaaaatggatcctgcttttcgtaatgcacaccaaagccaggttcaggttacgaacgtctaccat

SEQ ID NO: 13279 - DNA, 80 bp, synthetic construct
  misc_feature 1..80: note = Synthetic: >HKU9-cand-28930-29009
  source 1..80: mol_type = other DNA
gaatcgcgaacaagctccccagttagctggcaatatagtgagtaatatactacaggagttgcatgtaaaccctgatcgta

SEQ ID NO: 13280 - DNA, 80 bp, synthetic construct
  misc_feature 1..80: note = Synthetic: >HKU9-cand-29010-29089
  source 1..80: mol_type = other DNA
gaggcatgtacacacatggcacacctagggccagagttttaggttattgtctagcacaaatgtcttttgtacatgccata

SEQ ID NO: 13281 - DNA, 80 bp, synthetic construct
  misc_feature 1..80: note = Synthetic: >HKU9-cand-29090-29169
  source 1..80: mol_type = other DNA
ctttggaagatacccctctcctatggaccatttgtctttcgcatgttagatagaccagaccttttgttaagagcagcatt

SEQ ID NO: 13282 - DNA, 80 bp, synthetic construct
  misc_feature 1..80: note = Synthetic: >HKU9-cand-29170-29249
  source 1..80: mol_type = other DNA
acacatggaggttattgtcgttcaacttcgatcctagcgtgtcttggcatttgccagaatgtgctaagtttggatgcgtc

SEQ ID NO: 13283 - DNA, 80 bp, synthetic construct
  misc_feature 1..80: note = Synthetic: >HKU9-cand-29250-29329
  source 1..80: mol_type = other DNA
cagaacctacatttagtaacgcatgtgttatgctgtttatggtgcaatagctgcattatttcatcgcataccacagggtt

SEQ ID NO: 13284 - DNA, 80 bp, synthetic construct
  misc_feature 1..80: note = Synthetic: >HKU9-cand-29330-29409
  source 1..80: mol_type = other DNA
acaattttgcttttgtaacttctcctaagcgtcaatggccagaagtattgcatcagaatgatattatctagtgagactga

SEQ ID NO: 13285 - DNA, 80 bp, synthetic construct
  misc_feature 1..80: note = Synthetic: >HKU9-cand-29410-29489
  source 1..80: mol_type = other DNA
ggtttgacgcatgtcgcttcagtccactcttatacagaatggaatcctagtgtacagtggtataagtaagctgtgcattc

SEQ ID NO: 13286 - DNA, 80 bp, synthetic construct
  misc_feature 1..80: note = Synthetic: >HKU9-cand-29490-29569
  source 1..80: mol_type = other DNA
gctatgtttaggtttagaatgtagtttagtgctagttgattagagtatgttaaagaccttttaggcgcctacgggaagag

SEQ ID NO: 13287 - DNA, 80 bp, synthetic construct
  misc_feature 1..80: note = Synthetic: >HKU9-cand-29570-29649
  source 1..80: mol_type = other DNA
ctaatcagtaatacactatacaaaaattttaagcaacccctaatcatagtatgctttatagaggatttgcaaaaaaaaaa

SEQ ID NO: 13288 - DNA, 80 bp, synthetic construct
  misc_feature 1..80: note = Synthetic: >Lucheng19-cand-17930-18009
  source 1..80: mol_type = other DNA
catacaacaatggggttatacagggtcgcttagtgctaatcaccaccgctattgtaatgtgcactttaatgaacacgtcg

SEQ ID NO: 13289 - DNA, 80 bp, synthetic construct
  misc_feature 1..80: note = Synthetic: >Lucheng19-cand-18010-18089
  source 1..80: mol_type = other DNA
ctagcggtgatgctattatgacacggtgcctggccatatatgattgttttgtaaaaaacgtccactggaacattacctac

SEQ ID NO: 13290 - DNA, 80 bp, synthetic construct
  misc_feature 1..80: note = Synthetic: >Lucheng19-cand-18090-18169
  source 1..80: mol_type = other DNA
ccatatataacaaatgagaaggacataaacgcagctggccgctatgtcgagcgtcatctcatgaacacctttgtaaagct

SEQ ID NO: 13291 - DNA, 80 bp, synthetic construct
  misc_feature 1..80: note = Synthetic: >Lucheng19-cand-18170-18249
  source 1..80: mol_type = other DNA
ctataatccaaaagctatatatgatattggtaatccaaaaggcatacgcatttgtgattttaaaggttcctggtattgtt

SEQ ID NO: 13292 - DNA, 80 bp, synthetic construct
  misc_feature 1..80: note = Synthetic: >Lucheng19-cand-18250-18329
  source 1..80: mol_type = other DNA
atgacaaagaacctacaaacaataatgttgttaaattagaatatgactatactgtacatggacagttcgatggcctatgc

SEQ ID NO: 13293 - DNA, 80 bp, synthetic construct
  misc_feature 1..80: note = Synthetic: >Lucheng19-cand-18330-18409
  source 1..80: mol_type = other DNA
ctattttggaactgtaatgttgacatgtaccccgggtttagccttgtttgtaggtttgacactaagcatcgctcgcctct

SEQ ID NO: 13294 - DNA, 80 bp, synthetic construct
  misc_feature 1..80: note = Synthetic: >Lucheng19-cand-18410-18489
  source 1..80: mol_type = other DNA
gtccctagaaggtgttaatggtggctgcttatatgttaataagcacgcctttcacacaccagcttttgacagaagagcat

SEQ ID NO: 13295 - DNA, 80 bp, synthetic construct
  misc_feature 1..80: note = Synthetic: >Lucheng19-cand-18490-18569
  source 1..80: mol_type = other DNA
tggccaagctccaaccactgccattcttcttttttgacgatagagaatgtgacatagtcagcgacgctgaaagccccgaa

SEQ ID NO: 13296 - DNA, 80 bp, synthetic construct
  misc_feature 1..80: note = Synthetic: >Lucheng19-cand-18570-18649
  source 1..80: mol_type = other DNA
gtcgattatgtacctctacgtagcaacgtttgcattacgaagtgtaatgttggcggtgcagtttgcaagaaacatgcaag

SEQ ID NO: 13297 - DNA, 80 bp, synthetic construct
  misc_feature 1..80: note = Synthetic: >Lucheng19-cand-18650-18729
  source 1..80: mol_type = other DNA
tctgtataaaacgtatgtacagaagtacaacgacttcactcaaaatgggtttactctatggggccccaaaaattttgatt

SEQ ID NO: 13298 - DNA, 80 bp, synthetic construct
  misc_feature 1..80: note = Synthetic: >Lucheng19-cand-18730-18809
  source 1..80: mol_type = other DNA
tgtttaacctttggcagctcgtttccaaaccgattttgcagggattagaaaacctctcctacaacttactaaaaaagggt

SEQ ID NO: 13299 - DNA, 80 bp, synthetic construct
  misc_feature 1..80: note = Synthetic: >Lucheng19-cand-18810-18889
  source 1..80: mol_type = other DNA
acctttgttaacatgccaggagaactgccgacggctataattaatgataaagtcttcgttagagaaggcactgctgataa

SEQ ID NO: 13300 - DNA, 80 bp, synthetic construct
  misc_feature 1..80: note = Synthetic: >Lucheng19-cand-18890-18969
  source 1..80: mol_type = other DNA
tttagtttttactaataacacagcactgccgactaacgttgcctttgaactatatgttaaaaagaagctaggtctaacac

SEQ ID NO: 13301 - DNA, 80 bp, synthetic construct
  misc_feature 1..80: note = Synthetic: >Lucheng19-cand-18970-19049
  source 1..80: mol_type = other DNA
caccactaacactgttacgtaatttagaagtgacagcggcttacagatttgtattgtgggattatgaggcggataggccc

SEQ ID NO: 13302 - DNA, 80 bp, synthetic construct
  misc_feature 1..80: note = Synthetic: >Lucheng19-cand-19130-19209
  source 1..80: mol_type = other DNA
aggttccttggaaaggtttatatcctgtgatgatggtgtattgtttcagactcaagctcttaaaggtaaaactgccatac

SEQ ID NO: 13303 - DNA, 80 bp, synthetic construct
  misc_feature 1..80: note = Synthetic: >Lucheng19-cand-21760-21839
  source 1..80: mol_type = other DNA
taggtgtttttgtgcatagacctaaccaccccccagaattcatggcaccttgcagcctatccagcaacacctacaaacaa

SEQ ID NO: 13304 - DNA, 80 bp, synthetic construct
  misc_feature 1..80: note = Synthetic: >Lucheng19-cand-21840-21919
  source 1..80: mol_type = other DNA
aacttggatcttgtcatggtggcatacggacactcaaaccagttttgaacacggtagtgttatatcttatgtccaaattt

SEQ ID NO: 13305 - DNA, 80 bp, synthetic construct
  misc_feature 1..80: note = Synthetic: >Lucheng19-cand-21920-21999
  source 1..80: mol_type = other DNA
gtaagtaccaacagaatgctgtgaatgacattactaatggtaatagctgccaaaccaatatggcagggcccacaaacaca

SEQ ID NO: 13306 - DNA, 80 bp, synthetic construct
  misc_feature 1..80: note = Synthetic: >Lucheng19-cand-22000-22079
  source 1..80: mol_type = other DNA
acttgtgatgccattctcaacacaccaatagaatgtgtgatcaacacaacattcagacccacaacagtatcctggtgtca

SEQ ID NO: 13307 - DNA, 80 bp, synthetic construct
  misc_feature 1..80: note = Synthetic: >Lucheng19-cand-22080-22159
  source 1..80: mol_type = other DNA
cctatatcacgtggtataacaatcaaattaaagcagctatacaggggcagcgcttcacctttgatatcgatgaagggctg

SEQ ID NO: 13308 - DNA, 80 bp, synthetic construct
  misc_feature 1..80: note = Synthetic: >Lucheng19-cand-22160-22239
  source 1..80: mol_type = other DNA
caatggactaatgcgacagcattttgcgataacgcaaataactgtagtttcaataatcccaacacaacatcagaatggct

SEQ ID NO: 13309 - DNA, 80 bp, synthetic construct
  misc_feature 1..80: note = Synthetic: >Lucheng19-cand-22240-22319
  source 1..80: mol_type = other DNA
agttaccactgataataatggcacgataaacaattatgtaaattgtgatactgactatgaaagtcagcttaagtgcaaga

SEQ ID NO: 13310 - DNA, 80 bp, synthetic construct
  misc_feature 1..80: note = Synthetic: >Lucheng19-cand-22320-22399
  source 1..80: mol_type = other DNA
atatcgtcttcgaactaaaacctgcagtgtatcagggcgcagcactccacatacaatcagctatttattatgttgcaaac

SEQ ID NO: 13311 - DNA, 80 bp, synthetic construct
  misc_feature 1..80: note = Synthetic: >Lucheng19-cand-22400-22479
  source 1..80: mol_type = other DNA
gacctaccagattgtgacttttcatttgcagacatatttagggacggcacaggaaattatgaaggtctccgtagacatgt

SEQ ID NO: 13312 - DNA, 80 bp, synthetic construct
  misc_feature 1..80: note = Synthetic: >Lucheng19-cand-22480-22559
  source 1..80: mol_type = other DNA
tttcacaaactgctgggtcaactacacagcatggtttgcatgcgaggatgatcatgcctgcattatatttaatgcaatct

SEQ ID NO: 13313 - DNA, 80 bp, synthetic construct
  misc_feature 1..80: note = Synthetic: >Lucheng19-cand-22560-22639
  source 1..80: mol_type = other DNA
ttgcagaggtgcgatataaactaacacaacctgatggtctaatcaaccctttcattaaatgtaatggactggacctctac

SEQ ID NO: 13314 - DNA, 80 bp, synthetic construct
  misc_feature 1..80: note = Synthetic: >Lucheng19-cand-22640-22719
  source 1..80: mol_type = other DNA
acaatcactaaaggctgcactacaggctacgttttaaggtaccagctatatgataatggcaaattcaaccctaatgccta

SEQ ID NO: 13315 - DNA, 80 bp, synthetic construct
  misc_feature 1..80: note = Synthetic: >Lucheng19-cand-22720-22799
  source 1..80: mol_type = other DNA
cacacctgattacatggaatgttttggttattttcaaatagataatagttatattatttacaacgcaaagttcattacaa

SEQ ID NO: 13316 - DNA, 80 bp, synthetic construct
  misc_feature 1..80: note = Synthetic: >Lucheng19-cand-22800-22879
  source 1..80: mol_type = other DNA
aaggcttaacagtttgtgttgtacaacctgtcgaaccagaacttgacgtttgtaaacagtatactatagacggcgtgaca

SEQ ID NO: 13317 - DNA, 80 bp, synthetic construct
  misc_feature 1..80: note = Synthetic: >Lucheng19-cand-22880-22959
  source 1..80: mol_type = other DNA
ttccagggcatactaaaaaacacaaaacataacataaacactttccataatatactatattatggcgacatggtcagcca

SEQ ID NO: 13318 - DNA, 80 bp, synthetic construct
  misc_feature 1..80: note = Synthetic: >Lucheng19-cand-22960-23039
  source 1..80: mol_type = other DNA
tgtgaggattaagggtatagtgtacgccgtagagccatgcaacaggttttattacagcgtgttaaagaccaggtctgaaa

SEQ ID NO: 13319 - DNA, 80 bp, synthetic construct
  misc_feature 1..80: note = Synthetic: >Lucheng19-cand-24320-24399
  source 1..80: mol_type = other DNA
gacggaataatgttcttccattacacacttaaaccaaataacaccatcaaagtcgaaacaacaccaggactctgtttgag

SEQ ID NO: 13320 - DNA, 80 bp, synthetic construct
  misc_feature 1..80: note = Synthetic: >Lucheng19-cand-24400-24479
  source 1..80: mol_type = other DNA
taataatgtgtgtatagcacccaaagatggactatttgttaaacttaccaataccagagacaatgactggcattttacca

SEQ ID NO: 13321 - DNA, 80 bp, synthetic construct
  misc_feature 1..80: note = Synthetic: >Lucheng19-cand-24480-24559
  source 1..80: mol_type = other DNA
ctcgcaaccgctacaacccacaaccaataacggttaacaacacgctcacaattaatggcggtgtaaattttactagtctt

SEQ ID NO: 13322 - DNA, 80 bp, synthetic construct
  misc_feature 1..80: note = Synthetic: >Lucheng19-cand-24560-24639
  source 1..80: mol_type = other DNA
aaccagactatagagggaatagaaccaccaaccaacccatcttttgatgaagaatttgaagacttatacaagaatataac

SEQ ID NO: 13323 - DNA, 80 bp, synthetic construct
  misc_feature 1..80: note = Synthetic: >Lucheng19-cand-24640-24719
  source 1..80: mol_type = other DNA
attagagctcgaacagcttaaaaatataacatttgacccagaaatacttaatctgacatattatatagataggctagatg

SEQ ID NO: 13324 - DNA, 80 bp, synthetic construct
  misc_feature 1..80: note = Synthetic: >Lucheng19-cand-24720-24799
  source 1..80: mol_type = other DNA
agctagcaacaaatgtgtcacagctccacgtagatatatcagagtttaataaatatgtgcaatatattaaatggccctgg

SEQ ID NO: 13325 - DNA, 80 bp, synthetic construct
  misc_feature 1..80: note = Synthetic: >Lucheng19-cand-24800-24879
  source 1..80: mol_type = other DNA
tatgtctggctagcaatattcctggtacttgtactgttcagcttcatgatgctctggtgctgctgcgcaacaggctgttg

SEQ ID NO: 13326 - DNA, 80 bp, synthetic construct
  misc_feature 1..80: note = Synthetic: >Lucheng19-cand-24880-24959
  source 1..80: mol_type = other DNA
cggatgttgcggcatgcgaggcgccgcttgtaatggatgttgtactaaacctcaaactattgaatttgaaaaggtccacg

SEQ ID NO: 13327 - DNA, 80 bp, synthetic construct
  misc_feature 1..80: note = Synthetic: >Lucheng19-cand-24960-25039
  source 1..80: mol_type = other DNA
tacaatgataggtggtctcttttcaatagggtttgaacaattcatacaacatgctaaccacaccacaggtggcgcaatca

SEQ ID NO: 13328 - DNA, 80 bp, synthetic construct
  misc_feature 1..80: note = Synthetic: >Lucheng19-cand-25040-25119
  source 1..80: mol_type = other DNA
ccccaaatgccgctcaacccctaattaattatggcactgcaatttttagcatttacagctgcatctttctgtcattcttt

SEQ ID NO: 13329 - DNA, 80 bp, synthetic construct
  misc_feature 1..80: note = Synthetic: >Lucheng19-cand-25110-25189
  source 1..80: mol_type = other DNA
gtcattctttgcactctacagtgctaagtcagacagaaccaattgtctactgctcgtgctccgactgctgacgctatttg

SEQ ID NO: 13330 - DNA, 80 bp, synthetic construct
  misc_feature 1..80: note = Synthetic: >Lucheng19-cand-25190-25269
  source 1..80: mol_type = other DNA
tagcagtgccaattttgttgtgtacaggttattatatagatggcgctctaacaatccccatactacttaccagattctgc

SEQ ID NO: 13331 - DNA, 80 bp, synthetic construct
  misc_feature 1..80: note = Synthetic: >Lucheng19-cand-25270-25349
  source 1..80: mol_type = other DNA
tacctaacatactattgcatgagatttaagagaccacatttcattctatataacaccagtacactgctattcgcacaggg

SEQ ID NO: 13332 - DNA, 80 bp, synthetic construct
  misc_feature 1..80: note = Synthetic: >Lucheng19-cand-25350-25429
  source 1..80: mol_type = other DNA
taaatgtgtaccctatgccaaattaaactatttcgccaattatgcggcactttatggtggcgcaggtcatctaaccctag

SEQ ID NO: 13333 - DNA, 80 bp, synthetic construct
  misc_feature 1..80: note = Synthetic: >Lucheng19-cand-25430-25509
  source 1..80: mol_type = other DNA
gccgcaaagttataaatttcactgaagcacgcaatgtagtactggcagtgcgtggtaaagtacaggaggacttaccctta

SEQ ID NO: 13334 - DNA, 80 bp, synthetic construct
  misc_feature 1..80: note = Synthetic: >Lucheng19-cand-25510-25589
  source 1..80: mol_type = other DNA
gctcgcatggtagaactagccaacggtgagtgcatctatatttttaccaaagaacctgcagtcagtgtttataactttag

SEQ ID NO: 13335 - DNA, 80 bp, synthetic construct
  misc_feature 1..80: note = Synthetic: >PEDV-cand-2260-2339
  source 1..80: mol_type = other DNA
gaggatgctgctaattttgtagacctctgtaccaagaacattggtactgctggttttcatgagttttacattacggccca

SEQ ID NO: 13336 - DNA, 80 bp, synthetic construct
  misc_feature 1..80: note = Synthetic: >PEDV-cand-2340-2419
  source 1..80: mol_type = other DNA
tgaacaacaggatctgcaagggttcgtaaccacttgttgcacgatgtcaggttttgagtgttttatgcctataatcccac

SEQ ID NO: 13337 - DNA, 80 bp, synthetic construct
  misc_feature 1..80: note = Synthetic: >PEDV-cand-2430-2509
  source 1..80: mol_type = other DNA
agtgcttgaagagattgatggtggtagcatctggcggtcttttatcactggtcttaatacaatgtgggatttttgcaagc

SEQ ID NO: 13338 - DNA, 80 bp, synthetic construct
  misc_feature 1..80: note = Synthetic: >PEDV-cand-2510-2589
  source 1..80: mol_type = other DNA
atcttaaagtcagctttggactagatggcattgttgtcactgtagcacgcaaatttaaacgacttggtgctctcttggca

SEQ ID NO: 13339 - DNA, 80 bp, synthetic construct
  misc_feature 1..80: note = Synthetic: >PEDV-cand-2590-2669
  source 1..80: mol_type = other DNA
gaaatgtataacacttacctttcaactgtggtggaaaacttggtactggccggtgttagcttcaagtattatgccaccag

SEQ ID NO: 13340 - DNA, 80 bp, synthetic construct
  misc_feature 1..80: note = Synthetic: >PEDV-cand-2670-2749
  source 1..80: mol_type = other DNA
tgtcccaaaaattgttttgggctgttgttttcacagtgttaaaagtgttcttgcaagtgccttccagattcctgtccagg

SEQ ID NO: 13341 - DNA, 80 bp, synthetic construct
  misc_feature 1..80: note = Synthetic: >PEDV-cand-2750-2829
  source 1..80: mol_type = other DNA
caggcattgagaagtttaaagtcttccttaactgtgttcaccctgttgtaccacgcgtcattgaaacttcttttgtggaa

SEQ ID NO: 13342 - DNA, 80 bp, synthetic construct
  misc_feature 1..80: note = Synthetic: >PEDV-cand-2830-2909
  source 1..80: mol_type = other DNA
ttagaagagacgacatttaaaccaccagcactcaatggtagtattgctattgttgatggctttgctttctattatgatgg

SEQ ID NO: 13343 - DNA, 80 bp, synthetic construct
  misc_feature 1..80: note = Synthetic: >PEDV-cand-2910-2989
  source 1..80: mol_type = other DNA
aacactatactatcccaccgatggtaatagtgttgtgcctatctgttttaagaagaagggtggtggtgatgtcaaattct

SEQ ID NO: 13344 - DNA, 80 bp, synthetic construct
  misc_feature 1..80: note = Synthetic: >PEDV-cand-2990-3069
  source 1..80: mol_type = other DNA
ctgatgaagtctctgttagaaccattgacccagtttataaggtctcccttgaatttgagttcgagtctgagactattatg

SEQ ID NO: 13345 - DNA, 80 bp, synthetic construct
  misc_feature 1..80: note = Synthetic: >PEDV-cand-3070-3149
  source 1..80: mol_type = other DNA
gctgtgcttaataaggctgttggtaatcgtatcaaggttacaggtggttgggacgatgttgttgagtatatcaacgttgc

SEQ ID NO: 13346 - DNA, 80 bp, synthetic construct
  misc_feature 1..80: note = Synthetic: >PEDV-cand-3150-3229
  source 1..80: mol_type = other DNA
cattgaggttcttaaagatcacatcgatgtgcctaagtactacatctatgatgaggaaggtggcaccgatcctaatctgc

SEQ ID NO: 13347 - DNA, 80 bp, synthetic construct
  misc_feature 1..80: note = Synthetic: >PEDV-cand-3230-3309
  source 1..80: mol_type = other DNA
ccgtaatggtttctcagtggccgttgaatgatgacacgatctcacaggatctgcttgatgtggaagttgttactgatgca

SEQ ID NO: 13348 - DNA, 80 bp, synthetic construct
  misc_feature 1..80: note = Synthetic: >PEDV-cand-3310-3389
  source 1..80: mol_type = other DNA
ccaattgatttcgagggtgatgaagtagactcctctgaccctgataaggtggcagatgtggctaactctgagcctgagga

SEQ ID NO: 13349 - DNA, 80 bp, synthetic construct
  misc_feature 1..80: note = Synthetic: >PEDV-cand-3390-3469
  source 1..80: mol_type = other DNA
tgatggtcttaatgtagctcctgaaacaaatgtagagtctgaagttgaggaagttgccgcaaccttgtcctttattaaag

SEQ ID NO: 13350 - DNA, 80 bp, synthetic construct
  misc_feature 1..80: note = Synthetic: >PEDV-cand-3470-3549
  source 1..80: mol_type = other DNA
atacaccttccacagttactaaggatccttttgcttttgactttgcaagctatggaggacttaaggttttaagacaatct

SEQ ID NO: 13351 - DNA, 80 bp, synthetic construct
  misc_feature 1..80: note = Synthetic: >SARSCoV-cand-3660-3739
  source 1..80: mol_type = other DNA
tatttggtgctaaaccacttcagtctttacaagtgtgcgtgcagacggttcgtacacaggtttatattgcagtcaatgac

SEQ ID NO: 13352 - DNA, 80 bp, synthetic construct
  misc_feature 1..80: note = Synthetic: >SARSCoV-cand-3740-3819
  source 1..80: mol_type = other DNA
aaagctctttatgagcaggttgtcatggattatcttgataacctgaagcctagagtggaagcacctaaacaagaggagcc

SEQ ID NO: 13353 - DNA, 80 bp, synthetic construct
  misc_feature 1..80: note = Synthetic: >SARSCoV-cand-3820-3899
  source 1..80: mol_type = other DNA
accaaacacagaagattccaaaactgaggagaaatctgtcgtacagaagcctgtcgatgtgaagccaaaaattaaggcct

SEQ ID NO: 13354 - DNA, 80 bp, synthetic construct
  misc_feature 1..80: note = Synthetic: >SARSCoV-cand-3900-3979
  source 1..80: mol_type = other DNA
gcattgatgaggttaccacaacactggaagaaactaagtttcttaccaataagttactcttgtttgctgatatcaatggt

SEQ ID NO: 13355 - DNA, 80 bp, synthetic construct
  misc_feature 1..80: note = Synthetic: >SARSCoV-cand-3980-4059
  source 1..80: mol_type = other DNA
aagctttaccatgattctcagaacatgcttagaggtgaagatatgtctttccttgagaaggatgcaccttacatggtagg

SEQ ID NO: 13356 - DNA, 80 bp, synthetic construct
  misc_feature 1..80: note = Synthetic: >SARSCoV-cand-4060-4139
  source 1..80: mol_type = other DNA
tgatgttatcactagtggtgatatcacttgtgttgtaataccctccaaaaaggctggtggcactactgagatgctctcaa

SEQ ID NO: 13357 - DNA, 80 bp, synthetic construct
  misc_feature 1..80: note = Synthetic: >SARSCoV-cand-4140-4219
  source 1..80: mol_type = other DNA
gagctttgaagaaagtgccagttgatgagtatataaccacgtaccctggacaaggatgtgctggttatacacttgaggaa

SEQ ID NO: 13358 - DNA, 80 bp, synthetic construct
  misc_feature 1..80: note = Synthetic: >SARSCoV-cand-4220-4299
  source 1..80: mol_type = other DNA
gctaagactgctcttaagaaatgcaaatctgcattttatgtactaccttcagaagcacctaatgctaaggaagagattct

SEQ ID NO: 13359 - DNA, 80 bp, synthetic construct
  misc_feature 1..80: note = Synthetic: >SARSCoV-cand-4300-4379
  source 1..80: mol_type = other DNA
aggaactgtatcctggaatttgagagaaatgcttgctcatgctgaagagacaagaaaattaatgcctatatgcatggatg

SEQ ID NO: 13360 - DNA, 80 bp, synthetic construct
  misc_feature 1..80: note = Synthetic: >SARSCoV-cand-4380-4459
  source 1..80: mol_type = other DNA
ttagagccataatggcaaccatccaacgtaagtataaaggaattaaaattcaagagggcatcgttgactatggtgtccga

SEQ ID NO: 13361 - DNA, 80 bp, synthetic construct
  misc_feature 1..80: note = Synthetic: >SARSCoV-cand-4460-4539
  source 1..80: mol_type = other DNA
ttcttcttttatactagtaaagagcctgtagcttctattattacgaagctgaactctctaaatgagccgcttgtcacaat

SEQ ID NO: 13362 - DNA, 80 bp, synthetic construct
  misc_feature 1..80: note = Synthetic: >SARSCoV-cand-4540-4619
  source 1..80: mol_type = other DNA
gccaattggttatgtgacacatggttttaatcttgaagaggctgcgcgctgtatgcgttctcttaaagctcctgccgtag

SEQ ID NO: 13363 - DNA, 80 bp, synthetic construct
  misc_feature 1..80: note = Synthetic: >SARSCoV-cand-4620-4699
  source 1..80: mol_type = other DNA
tgtcagtatcatcaccagatgctgttactacatataatggatacctcacttcgtcatcaaagacatctgaggagcacttt

SEQ ID NO: 13364 - DNA, 80 bp, synthetic construct
  misc_feature 1..80: note = Synthetic: >SARSCoV-cand-4700-4779
  source 1..80: mol_type = other DNA
gtagaaacagtttctttggctggctcttacagagattggtcctattcaggacagcgtacagagttaggtgttgaatttct

SEQ ID NO: 13365 - DNA, 80 bp, synthetic construct
  misc_feature 1..80: note = Synthetic: >SARSCoV-cand-4780-4859
  source 1..80: mol_type = other DNA
taagcgtggtgacaaaattgtgtaccacactctggagagccccgtcgagtttcatcttgacggtgaggttctttcacttg

SEQ ID NO: 13366 - DNA, 80 bp, synthetic construct
  misc_feature 1..80: note = Synthetic: >SARSCoV-cand-4860-4939
  source 1..80: mol_type = other DNA
acaaactaaagagtctcttatccctgcgggaggttaagactataaaagtgttcacaactgtggacaacactaatctccac

SEQ ID NO: 13367 - DNA, 80 bp, synthetic construct
  misc_feature 1..80: note = Synthetic: >Shrew-cand-24660-24739
  source 1..80: mol_type = other DNA
gctaatgtgtatttcactactacctctgcctcaagaagtcagagtagagataattcaagggctgcaagcagaagtgggag

SEQ ID NO: 13368 - DNA, 80 bp, synthetic construct
  misc_feature 1..80: note = Synthetic: >Shrew-cand-24740-24819
  source 1..80: mol_type = other DNA
taagagtcggattcaatctagatctccttctgctgagcgaggccacgtagatataaagctagctgtacttgaagctctca

SEQ ID NO: 13369 - DNA, 80 bp, synthetic construct
  misc_feature 1..80: note = Synthetic: >Shrew-cand-24820-24899
  source 1..80: mol_type = other DNA
aggatcttggcattggtcaagatactaagaagaagagttcaaaaagtgctgctgcttctggtaataatacaccaaagcaa

SEQ ID NO: 13370 - DNA, 80 bp, synthetic construct
  misc_feature 1..80: note = Synthetic: >Shrew-cand-24900-24979
  source 1..80: mol_type = other DNA
gaaagctctccaaaagttcaacgtaagcaaatagaacggctcagacacaaaagagtgcccactggtaaagaaaatattac

SEQ ID NO: 13371 - DNA, 80 bp, synthetic construct
  misc_feature 1..80: note = Synthetic: >Shrew-cand-24980-25059
  source 1..80: mol_type = other DNA
agtttgttttggaccaagaggaccagaacaaaattttggtagtgatgaaatagtaaatggtggggcacaaggaaagaaag

SEQ ID NO: 13372 - DNA, 80 bp, synthetic construct
  misc_feature 1..80: note = Synthetic: >Shrew-cand-25060-25139
  source 1..80: mol_type = other DNA
tggctcaattgcttgaaaatgttccaggtccttctgccctcctttttggaggaaaagtagaacaaattggaaaagccaat

SEQ ID NO: 13373 - DNA, 80 bp, synthetic construct
  misc_feature 1..80: note = Synthetic: >Shrew-cand-25140-25219
  source 1..80: mol_type = other DNA
ggaaaagttgctgttcagtacacttatgtggctgagttggatgataatgaagaggtgaaaaggtttttagatctgattga

SEQ ID NO: 13374 - DNA, 80 bp, synthetic construct
  misc_feature 1..80: note = Synthetic: >Shrew-cand-25220-25299
  source 1..80: mol_type = other DNA
tgcatataaaaaaccaacgactgcaaattcaattaattctgtgttgaatcctcaagctactgcttttgcaccacctagtg

SEQ ID NO: 13375 - DNA, 80 bp, synthetic construct
  misc_feature 1..80: note = Synthetic: >Shrew-cand-25300-25379
  source 1..80: mol_type = other DNA
gagtaattgaagagcttcaggatgaccttaattaaaattgtctttgtcagcgttgttttagtttgtgtatctgcagattt

SEQ ID NO: 13376 - DNA, 80 bp, synthetic construct
  misc_feature 1..80: note = Synthetic: >Shrew-cand-25380-25459
  source 1..80: mol_type = other DNA
aattagtgatttatgtaaagattgtgaaaagtgtcaaggtttgagtccgaggtggagaagtgtagcttgtcgagattatt

SEQ ID NO: 13377 - DNA, 80 bp, synthetic construct
  misc_feature 1..80: note = Synthetic: >Shrew-cand-25460-25539
  source 1..80: mol_type = other DNA
ttaattctcttcaacgcactacttctgctaaatggaataatttgttaaccttgagacgtctcaaagatggacaaatccaa

SEQ ID NO: 13378 - DNA, 80 bp, synthetic construct
  misc_feature 1..80: note = Synthetic: >Shrew-cand-25540-25619
  source 1..80: mol_type = other DNA
gtactgaaaagtttgtgtaagcttggattgaattatgatggtagaaaaatagaaatccacacttattgtggagagtttca

SEQ ID NO: 13379 - DNA, 80 bp, synthetic construct
  misc_feature 1..80: note = Synthetic: >Shrew-cand-25620-25699
  source 1..80: mol_type = other DNA
tgatcctacgtattttagaaataaattaggttggactgaagatgatctttcaaattttcttggtgacaagagtttgaaga

SEQ ID NO: 13380 - DNA, 80 bp, synthetic construct
  misc_feature 1..80: note = Synthetic: >Shrew-cand-25700-25779
  source 1..80: mol_type = other DNA
aaatgtatttgagagataatgatttgtagatgattagttcatgagtgagacatggcacccctttgcatgtgctaggatgt

SEQ ID NO: 13381 - DNA, 80 bp, synthetic construct
  misc_feature 1..80: note = Synthetic: >Shrew-cand-25780-25859
  source 1..80: mol_type = other DNA
gtctcgtcttatccataagaactagcctgtcatatagtaggataagtaggctatatgattttattgtatttagtagaaag

SEQ ID NO: 13382 - DNA, 80 bp, synthetic construct
  misc_feature 1..80: note = Synthetic: >Shrew-cand-25860-25939
  source 1..80: mol_type = other DNA
caatgataatattttaaattaaagtgattgaaagatgcctttaaggagcccaaagtggaagagttaatttaaataaaaag

SEQ ID NO: 13383 - DNA, 80 bp, synthetic construct
  misc_feature 1..80: note = Synthetic: >Sparrow-cand-3870-3949
  source 1..80: mol_type = other DNA
agttgtccgcaccactcaagattttgaccaagtcaccaccaaggcactaacaccccagggagtgttggatgctaatcttt

SEQ ID NO: 13384 - DNA, 80 bp, synthetic construct
  misc_feature 1..80: note = Synthetic: >Sparrow-cand-3950-4029
  source 1..80: mol_type = other DNA
ttgatggtgaagactttgttcaagacccaaaaccaggtcagatttacttagaggttactgacgaagttcagaaccaggct

SEQ ID NO: 13385 - DNA, 80 bp, synthetic construct
  misc_feature 1..80: note = Synthetic: >Sparrow-cand-4030-4109
  source 1..80: mol_type = other DNA
aaggagcttgaccttactttgcaacaatattgtgcctacctaaaaatgtgccaccactcttggagtgtaagtcgcacaaa

SEQ ID NO: 13386 - DNA, 80 bp, synthetic construct
  misc_feature 1..80: note = Synthetic: >Sparrow-cand-4110-4189
  source 1..80: mol_type = other DNA
cgggttgatgcacctcaaacaaaaggataacaactgttttgttagtgcaggtataaacctgttccaaaacactgcttatc

SEQ ID NO: 13387 - DNA, 80 bp, synthetic construct
  misc_feature 1..80: note = Synthetic: >Sparrow-cand-4190-4269
  source 1..80: mol_type = other DNA
aactcaagcctgccattgatgccctctatcgggagtatcttaatggcaacccaaacagatttgttgcttggatttatgca

SEQ ID NO: 13388 - DNA, 80 bp, synthetic construct
  misc_feature 1..80: note = Synthetic: >Sparrow-cand-4270-4349
  source 1..80: mol_type = other DNA
tccactaatcgcaagatcggtgagatgggttgtccacagcaagtcatatctttgcttgtcaataacactgacgcaaagtt

SEQ ID NO: 13389 - DNA, 80 bp, synthetic construct
  misc_feature 1..80: note = Synthetic: >Sparrow-cand-4350-4429
  source 1..80: mol_type = other DNA
ttctgctacgaccgcctgctgtaacacctactttaaccaccagggtgttatttcagtcgctcgtgaatatgatcctttga

SEQ ID NO: 13390 - DNA, 80 bp, synthetic construct
  misc_feature 1..80: note = Synthetic: >Sparrow-cand-4430-4509
  source 1..80: mol_type = other DNA
taccaaaagtctactgtatgaagtgtgacatctggacaccattcactccacagagtggtaagggtgcagttgctattggc

SEQ ID NO: 13391 - DNA, 80 bp, synthetic construct
  misc_feature 1..80: note = Synthetic: >Sparrow-cand-4510-4589
  source 1..80: mol_type = other DNA
acttctgcagaagaacctactggaccagccattaagtttgccgcagcccactgctggtatactaatggcaagaaaacaat

SEQ ID NO: 13392 - DNA, 80 bp, synthetic construct
  misc_feature 1..80: note = Synthetic: >Sparrow-cand-4590-4669
  source 1..80: mol_type = other DNA
taatggctatgacgctaaagctaacgttgtagccacctatcacagatttgacgttcctaaaccccaaccggttgaggaaa

SEQ ID NO: 13393 - DNA, 80 bp, synthetic construct
  misc_feature 1..80: note = Synthetic: >Sparrow-cand-4670-4749
  source 1..80: mol_type = other DNA
tcgttacacttcctgtgaagaatgactttgaagttcttaaggtcgaggagctgccccaggatagtgtccttcacttggac

SEQ ID NO: 13394 - DNA, 80 bp, synthetic construct
  misc_feature 1..80: note = Synthetic: >Sparrow-cand-4750-4829
  source 1..80: mol_type = other DNA
cctcctgcagcacaagccccacaacctgaagaacaacaacaacatgctgaagttcttgataatccggattatctggagat

SEQ ID NO: 13395 - DNA, 80 bp, synthetic construct
  misc_feature 1..80: note = Synthetic: >Sparrow-cand-4830-4909
  source 1..80: mol_type = other DNA
tcttgacctttggattcgtagacccaaattcatcctagttaaatcttggagtgttttgggtagagctttatgtaagaccg

SEQ ID NO: 13396 - DNA, 80 bp, synthetic construct
  misc_feature 1..80: note = Synthetic: >Sparrow-cand-4910-4989
  source 1..80: mol_type = other DNA
gcaaagtggtcttcttaagcgcaaaacttgtgcaacgtttctacaactatcttgtggaaatcggagctattgatgctact

SEQ ID NO: 13397 - DNA, 80 bp, synthetic construct
  misc_feature 1..80: note = Synthetic: >Sparrow-cand-4990-5069
  source 1..80: mol_type = other DNA
gctagaatctctatcgatctagcgtgtaaatttgttcgtaaggttgtaccttcttcgaacactgttcgcaaaacttgtat

SEQ ID NO: 13398 - DNA, 80 bp, synthetic construct
  misc_feature 1..80: note = Synthetic: >Sparrow-cand-5070-5149
  source 1..80: mol_type = other DNA
tggactgtattattcagcccagacactttttgtttcactagcaccctttcttatgttaccagcagtagctagcctgctta

SEQ ID NO: 13399 - DNA, 80 bp, synthetic construct
  misc_feature 1..80: note = Synthetic: >Sb512-cand-15140-15219
  source 1..80: mol_type = other DNA
tgacattgtaaaaaccgaccctgttatactccttgaacgatatgtgtctttagctatagatgcctaccctctttccaaac

SEQ ID NO: 13400 - DNA, 80 bp, synthetic construct
  misc_feature 1..80: note = Synthetic: >BtSk_AlphaCoV-cand-15090-15169
  source 1..80: mol_type = other DNA
agatgacattgtaaaaaccgaccctgttatactccttgaacgatatgtgtctttagctatagatgcctaccccctttcca

SEQ ID NO: 13401 - DNA, 80 bp, synthetic construct
  misc_feature 1..80: note = Synthetic: >Sk512R-cand-15120-15199
  source 1..80: mol_type = other DNA
gtgtttttgtagatgacattgtaaaaacagaccctgttatactccttgaacgatatgtgtctttagctatagatgcctac

SEQ ID NO: 13402 - DNA, 80 bp, synthetic construct
  misc_feature 1..80: note = Synthetic: >Sk512R-cand-15280-15359
  source 1..80: mol_type = other DNA
actcaaccaaggagttttggattctttctctgttacactattagaggatgcaactgcaaagttttgggatgaaagctttt

SEQ ID NO: 13403 - DNA, 80 bp, synthetic construct
  misc_feature 1..80: note = Synthetic: >BtSk_AlphaCoV-cand-15250-15329
  source 1..80: mol_type = other DNA
ggagttttggattctttctctgttacactattagaggatgcaactgcaaagttttgggatgaaagtttttatgctagtat

SEQ ID NO: 13404 - DNA, 80 bp, synthetic construct
  misc_feature 1..80: note = Synthetic: >Sb512-cand-15300-15379
  source 1..80: mol_type = other DNA
gttttggattctttctctgttacactattagaggatgcaactgcaaagttttgggatgaaagtttttatgctagtatgta

SEQ ID NO: 13405 - DNA, 80 bp, synthetic construct
  misc_feature 1..80: note = Synthetic: >Sk512R-cand-12820-12899
  source 1..80: mol_type = other DNA
tacgaagtcagttatggaacacgagcagtccatttataatctgatttcggattgtggtgcagttgcaaagcatgactttt

SEQ ID NO: 13406 - DNA, 80 bp, synthetic construct
  misc_feature 1..80: note = Synthetic: >Sb512-cand-12830-12909
  source 1..80: mol_type = other DNA
gaagtcagttatggaacacgagcagtccatttataatctgatttcggattgtggtgcagttgcaaagcatgactttttca

SEQ ID NO: 13407 - DNA, 80 bp, synthetic construct
  misc_feature 1..80: note = Synthetic: >BtSk_AlphaCoV-cand-12790-12869
  source 1..80: mol_type = other DNA
tcagttatggaacacgagcagtccatttataatctgatttcggattgtggtgcagttgcaaagcatgactttttcacttg

SEQ ID NO: 13408 - DNA, 80 bp, synthetic construct
  misc_feature 1..80: note = Synthetic: >Quail-cand-16180-16259
  source 1..80: mol_type = other DNA
atagacgttgaagcagcacacgccataaaacctaacaccggtacaaacctgccacttcaaattggtttcagtactggtat

SEQ ID NO: 13409 - DNA, 80 bp, synthetic construct
  misc_feature 1..80: note = Synthetic: >Sparrow-cand-16260-16339
  source 1..80: mol_type = other DNA
atcggcatagacgttgaagcagcacacgccataaaacctaacactggtacgaacctgccacttcaaattggttttagtac

SEQ ID NO: 13410 - DNA, 80 bp, synthetic construct
  misc_feature 1..80: note = Synthetic: >Sk512R-cand-26160-26239
  source 1..80: mol_type = other DNA
gctttctacgtgaagtccaagcatggcgactactatgctgctgcgaatccaacagaggttgtaacagatagtgagaaaat

SEQ ID NO: 13411 - DNA, 80 bp, synthetic construct
  misc_feature 1..80: note = Synthetic: >Sb512-cand-6060-6139
  source 1..80: mol_type = other DNA
aaatgtttcacctgttactagtgtggttgtttgtaacaacaagaagattgtagtacaggaccctgttaaacgtgttgagc

SEQ ID NO: 13412 - DNA, 80 bp, synthetic construct
  misc_feature 1..80: note = Synthetic: >Sk512R-cand-6050-6129
  source 1..80: mol_type = other DNA
cttaaatgtttcacctgttactagtgtggttgtttgcaacaacaagaaggttgtagtacaggaccccgttaaacgtgtcg

SEQ ID NO: 13413 - DNA, 80 bp, synthetic construct
  misc_feature 1..80: note = Synthetic: >HKU5R-cand-21680-21759
  source 1..80: mol_type = other DNA
caaattaacgaacttgtgatttctctcttgtcgcaaggtaaacttattattcgcgacaatgatacgctcagtgttagtac

SEQ ID NO: 13414 - DNA, 80 bp, synthetic construct
  misc_feature 1..80: note = Synthetic: >SEAC-cand-22120-22199
  source 1..80: mol_type = other DNA
tgaaaagcacgacactacttacgtagcacctgttactaatgagaggtacacagaaatgccattggaccatcaattaattt

SEQ ID NO: 13415 - DNA, 80 bp, synthetic construct
  misc_feature 1..80: note = Synthetic: >SEAC-cand-25240-25319
  source 1..80: mol_type = other DNA
agaattgctactggtgtgcagcctgcacacttaccgcaatttgtgactgtcgccaaacctggcacgactataatttatac

SEQ ID NO: 13416 - DNA, 80 bp, synthetic construct
  misc_feature 1..80: note = Synthetic: >HKU5R-cand-22880-22959
  source 1..80: mol_type = other DNA
tgagttcatagaacaagccaccacagaagagtgtgacttcacacctatgttgactggcacacctcctcctatatataatt

SEQ ID NO: 13417 - DNA, 80 bp, synthetic construct
  misc_feature 1..80: note = Synthetic: >HKU4R-cand-18190-18269
  source 1..80: mol_type = other DNA
ggtcttcctcctgcttatgcacctacttatttaagtgtagatgctaaatataaaactacagatgagttgtgtgtgaattt

SEQ ID NO: 13418 - DNA, 80 bp, synthetic construct
  misc_feature 1..80: note = Synthetic: >BtSk_AlphaCoV-cand-18230-18309
  source 1..80: mol_type = other DNA
agtatgattatattactcatggccagttggatggcttgtgcctgttttggaattgtaatgtggacatgtacccagaattt

SEQ ID NO: 13419 - DNA, 80 bp, synthetic construct
  misc_feature 1..80: note = Synthetic: >SARSRC-cand-18750-18829
  source 1..80: mol_type = other DNA
catgtggctagctgtgatgctatcatgactagatgtcttgcagtccatgagtgctttgttaagcgcgttgattggtctgt

SEQ ID NO: 13420 - DNA, 80 bp, synthetic construct
  misc_feature 1..80: note = Synthetic: >SEAC-cand-25640-25719
  source 1..80: mol_type = other DNA
tggttattgggttgaacaaaaacgctggcgaatgcaaaaaggccaacgtaaagatcagccttctaactggcacttttatt

SEQ ID NO: 13421 - DNA, 80 bp, synthetic construct
  misc_feature 1..80: note = Synthetic: >HKU24-cand-5870-5949
  source 1..80: mol_type = other DNA
aacagctcacatgttttgatgcacataatgttaagaagtgcacaactcttgtagatggtgttacagattgtctgtacact

SEQ ID NO: 13422 - DNA, 80 bp, synthetic construct
  misc_feature 1..80: note = Synthetic: >BetaSp-cand-6200-6279
  source 1..80: mol_type = other DNA
acagctcacatgttttgatgcacataatgttaaaaagtgcacaactcttgtagatagtgttacagattgtctgtacacta

SEQ ID NO: 13423 - DNA, 80 bp, synthetic construct
  misc_feature 1..80: note = Synthetic: >HKU5R-cand-29210-29289
  source 1..80: mol_type = other DNA
gaacaggacctgaggcaaatctccctttcagatcagtcaaggatggaatcatctgggtccacgaaaacggtgccacagat

SEQ ID NO: 13424 - DNA, 80 bp, synthetic construct
  misc_feature 1..80: note = Synthetic: >HKU4R-cand-12830-12909
  source 1..80: mol_type = other DNA
actatggtcgtaacagctggtactgatcaagttaattgtaatagtagtgccgtagcttactatgagcctgttcaaggcca

SEQ ID NO: 13425 - DNA, 80 bp, synthetic construct
  misc_feature 1..80: note = Synthetic: >HKU5R-cand-27530-27609
  source 1..80: mol_type = other DNA
agatcattacgtccacttattgacatgaggtcaaattttatccgtgtcaatacagttgcaggcggggttgttatacctgt

SEQ ID NO: 13426 - DNA, 80 bp, synthetic construct
  misc_feature 1..80: note = Synthetic: >MbCoV1-cand-3130-3209
  source 1..80: mol_type = other DNA
atgttgttggtgaattcgtagacctacctgattacttcatctatgatgaagaaggtggtcatgacttaactaacactgtt

SEQ ID NO: 13427 - DNA, 80 bp, synthetic construct
  misc_feature 1..80: note = Synthetic: >Sk512R-cand-3570-3649
  source 1..80: mol_type = other DNA
aaccagtccagcaataactgctgggtttcatcagcactaattcaattgcaacttacgggtttgcttgatagcgatgaaat

SEQ ID NO: 13428 - DNA, 80 bp, synthetic construct
  misc_feature 1..80: note = Synthetic: >Sb512-cand-3580-3659
  source 1..80: mol_type = other DNA
cagtccagcaataactgttgggtttcatcagccctagttcaattgcaacttacgggtttgcttgatagcgatgaaatgca

SEQ ID NO: 13429 - DNA, 80 bp, synthetic construct
  misc_feature 1..80: note = Synthetic: >MbCoV1-cand-6570-6649
  source 1..80: mol_type = other DNA
aagcttgatgatgcttcagaaaagtttttcagttttggtgatattgtctccaagaatgtttgcaactcgataatatggtt

SEQ ID NO: 13430 - DNA, 80 bp, synthetic construct
  misc_feature 1..80: note = Synthetic: >MsbCoV1-cand-6570-6649
  source 1..80: mol_type = other DNA
atgcgtcagaaaagtttttcagttttggtgatattgtctccaagaatgtttgcaactcgataatatggttcttcaccatg

SEQ ID NO: 13431 - DNA, 80 bp, synthetic construct
  misc_feature 1..80: note = Synthetic: >BtSk_AlphaCoV-cand-19190-19269
  source 1..80: mol_type = other DNA
aaccatttacttggtacatttacactcgaaaggatggtgcctttgttgaataccctgatggttatttcactcaaggacgt

SEQ ID NO: 13432 - DNA, 80 bp, synthetic construct
  misc_feature 1..80: note = Synthetic: >Sb512-cand-19240-19319
  source 1..80: mol_type = other DNA
catttacttggtacatttacactcgaaaggatggtgcctttgttgaataccctgatggttatttcactcaaggacgtgtc

SEQ ID NO: 13433 - DNA, 80 bp, synthetic construct
  misc_feature 1..80: note = Synthetic: >SEAC-cand-23080-23159
  source 1..80: mol_type = other DNA
tgctgagctgcgtaacacacatcgttatgtgcaatctcttattaatgaatgtgtttatgctcagagtttaagaaatggtt

SEQ ID NO: 13434 - DNA, 80 bp, synthetic construct
  misc_feature 1..80: note = Synthetic: >BtRf_AlphaCoV-cand-14530-14609
  source 1..80: mol_type = other DNA
atgttggtgacatctctgcttttaaggcaactttgtactatcagaacaatgtgtttatgagtacagctaagtgttgggtt

SEQ ID NO: 13435 - DNA, 80 bp, synthetic construct
  misc_feature 1..80: note = Synthetic: >HKU2R-cand-14570-14649
  source 1..80: mol_type = other DNA
tgacatttccgcttttaaggctacattatactatcagaataatgtgtttatgagtacagctaagtgttgggttgaagaag

SEQ ID NO: 13436 - DNA, 80 bp, synthetic construct
  misc_feature 1..80: note = Synthetic: >HKU4R-cand-10830-10909
  source 1..80: mol_type = other DNA
aacccaccagagttggaattgtaacttataatgaatgggctttgagtaatcagtttacagaatttgtaggcacacagtcc

SEQ ID NO: 13437 - DNA, 80 bp, synthetic construct
  misc_feature 1..80: note = Synthetic: >HKU17-cand-19210-19289
  source 1..80: mol_type = other DNA
aacccggctactgcctgtaagctaaaagcaactccaatcatctctgctcgtgagttagagaagaagcctattcttcgcta

SEQ ID NO: 13438 - DNA, 80 bp, synthetic construct
  misc_feature 1..80: note = Synthetic: >HKU15-cand-13450-13529
  source 1..80: mol_type = other DNA
atgccaactcggtatttaacatcttacaggtggtttctgctaatgtagccaccttcttatcaacttccaccacgacacat

SEQ ID NO: 13439 - DNA, 80 bp, synthetic construct
  misc_feature 1..80: note = Synthetic: >SEAC-cand-26600-26679
  source 1..80: mol_type = other DNA
caactaaacatgaaccagcttatctttttcctgtgtatgatgtgctgttatgctattctttttgattggctttttaatct

SEQ ID NO: 13440 - DNA, 80 bp, synthetic construct
  misc_feature 1..80: note = Synthetic: >Sparrow-cand-13790-13869
  source 1..80: mol_type = other DNA
agattcaaagtgttggacagaaactgacatgacagttggccctcatgaattctgctcacagcacactgtgttggcagagc

SEQ ID NO: 13441 - DNA, 80 bp, synthetic construct
  misc_feature 1..80: note = Synthetic: >Quail-cand-13720-13799
  source 1..80: mol_type = other DNA
tgttggacagaaactgacatgacagttggccctcatgaattctgctctcagcacactgtgttggcagagtatgatggcaa

SEQ ID NO: 13442 - DNA, 80 bp, synthetic construct
  misc_feature 1..80: note = Synthetic: >HKU5-cand-8320-8399
  source 1..80: mol_type = other DNA
gcataaagagaggtgatgacttccaaactgttatcaagactttcactgatgccgctcgtggtccagctggtgtggaatct

SEQ ID NO: 13443 - DNA, 80 bp, synthetic construct
  misc_feature 1..80: note = Synthetic: >HKU5R-cand-8320-8399
  source 1..80: mol_type = other DNA
taaagagaggtgatgacttccaaactgttatcaagactttcactgatgccgctcgtggttcagctggtgtggaatctgat

SEQ ID NO: 13444 - DNA, 80 bp, synthetic construct
  misc_feature 1..80: note = Synthetic: >MbCoV1-cand-6810-6889
  source 1..80: mol_type = other DNA
agattctttaagtttagtgtaatagcttacactttatatgcactaagtttcatgtttgtgcgctttagtcctgctaatga

SEQ ID NO: 13445 - DNA, 80 bp, synthetic construct
  misc_feature 1..80: note = Synthetic: >MsbCoV1-cand-6810-6889
  source 1..80: mol_type = other DNA
agtttagtgtaatagcttacactttatatgcactaagtttcatgtttgtgcgctttagtcctgctaatgattacttctgc

SEQ ID NO: 13446 - DNA, 80 bp, synthetic construct
  misc_feature 1..80: note = Synthetic: >HghCoV1-cand-27810-27889
  source 1..80: mol_type = other DNA
agattggttttaacgaactatataatcatgtctaacgacaccctatctcaggaagaagttattgctgttattaaagactg

SEQ ID NO: 13447 - DNA, 80 bp, synthetic construct
  misc_feature 1..80: note = Synthetic: >HKU31-cand-27930-28009
  source 1..80: mol_type = other DNA
cagattggttttaacgaactatataatcatgtctaacgaaaccctatctcaggatgaagttattgctattattaaagact

SEQ ID NO: 13448 - DNA, 80 bp, synthetic construct
  misc_feature 1..80: note = Synthetic: >WIV16-cand-25050-25129
  source 1..80: mol_type = other DNA
tgagcaatatattaaatggccttggtatgtttggctcggcttcattgctggactaattgccatcgtcatggttacaatct

SEQ ID NO: 13449 - DNA, 80 bp, synthetic construct
  misc_feature 1..80: note = Synthetic: >SARSCoV-cand-25090-25169
  source 1..80: mol_type = other DNA
tgggaaaatatgagcaatatattaaatggccttggtatgtttggctcggcttcattgctggactaattgccatcgtcatg

SEQ ID NO: 13450 - DNA, 80 bp, synthetic construct
  misc_feature 1..80: note = Synthetic: >MbCoV1-cand-20500-20579
  source 1..80: mol_type = other DNA
ttgtactacactttacttacaagacaaatttgaccttgtcatttcagatatgtatgacggtcgtattaaacaaatggatg

SEQ ID NO: 13451 - DNA, 80 bp, synthetic construct
  misc_feature 1..80: note = Synthetic: >MsbCoV1-cand-20480-20559
  source 1..80: mol_type = other DNA
ttactggtgactgtactacactttatttacaagataaatttgaccttgtcatttcagatatgtatgacggtcgtattaaa

SEQ ID NO: 13452 - DNA, 80 bp, synthetic construct
  misc_feature 1..80: note = Synthetic: >Sb512-cand-17960-18039
  source 1..80: mol_type = other DNA
ccatgaagtttgtaacattcatagaaatgaacatgttgcttcaggtgatgcagctatgactaggtgcttggctattcatg

SEQ ID NO: 13453 - DNA, 80 bp, synthetic construct
  misc_feature 1..80: note = Synthetic: >BtSk_AlphaCoV-cand-17910-17989
  source 1..80: mol_type = other DNA
tcaccatgaagtttgtaacattcatagaaatgaacatgttgcttcaggtgatgcagctatgactaggtgcttggctattc

SEQ ID NO: 13454 - DNA, 80 bp, synthetic construct
  misc_feature 1..80: note = Synthetic: >Quail-cand-17300-17379
  source 1..80: mol_type = other DNA
gtaacactggtaccacactctgccctgttcacgctcttgaatatcaagagtttatcaatgcatacaatctcatggcacgc

SEQ ID NO: 13455 - DNA, 80 bp, synthetic construct
  misc_feature 1..80: note = Synthetic: >AlphaMink-cand-12470-12549
  source 1..80: mol_type = other DNA
catgagcaagtctgttataacgctttaaaacattccaatgctctagcttcgcatgactttttcgagtacagtgaaggtag

SEQ ID NO: 13456 - DNA, 80 bp, synthetic construct
  misc_feature 1..80: note = Synthetic: >MinkCoV1-cand-12490-12569
  source 1..80: mol_type = other DNA
tggaccatgagcaagtctgttataacgctttaaaacattccaatgccttagcttcacatgatttttttgagtatagtgaa

SEQ ID NO: 13457 - DNA, 80 bp, synthetic construct
  misc_feature 1..80: note = Synthetic: >AcCoV_JC34-cand-12930-13009
  source 1..80: mol_type = other DNA
tcggtgatttcgtagaagggccagaaggttatggtgttccctgtgttgcctcctattatagttatatgatgccaatcatg

SEQ ID NO: 13458 - DNA, 80 bp, synthetic construct
  misc_feature 1..80: note = Synthetic: >HKU15-cand-13770-13849
  source 1..80: mol_type = other DNA
gactcaaagtgttggacagaaactgacatgaatgttggccctcatgaattttgctcacagcatactgtgttagcagagca

SEQ ID NO: 13459 - DNA, 80 bp, synthetic construct
  misc_feature 1..80: note = Synthetic: >HKU5R-cand-30170-30249
  source 1..80: mol_type = other DNA
ccgattcagaggcataaattgccaattgaacgtaacaagagtcgaggcgatcgctagtgttctggaaaccccattacatg

SEQ ID NO: 13460 - DNA, 80 bp, synthetic construct
  misc_feature 1..80: note = Synthetic: >MT114538-cand-25180-25259
  source 1..80: mol_type = other DNA
ttatttttagctttgtaccgtagtacaaactttaaaacgtgtgtcggtatcttaatgttcaagattgtatcaatgacact

SEQ ID NO: 13461 - DNA, 80 bp, synthetic construct
  misc_feature 1..80: note = Synthetic: >MN531555-cand-3040-3119
  source 1..80: mol_type = other DNA
agtgtctataatggttgtattgtccataaagacgctctggatgttgtaaacctcccatcaggtgaagaggtttatgttat

SEQ ID NO: 13462 - DNA, 80 bp, synthetic construct
  misc_feature 1..80: note = Synthetic: >MT114540-cand-22160-22239
  source 1..80: mol_type = other DNA
atctgtcagtgttacacttagactcctgtacagattataatatatatggtagaactggtgttggtattatcagacaaact

SEQ ID NO: 13463 - DNA, 80 bp, synthetic construct
  misc_feature 1..80: note = Synthetic: >MN517816-cand-8330-8409
  source 1..80: mol_type = other DNA
ttaaagcatatgccaccattgtgtttacaataatgttagtttgggttattaatgcatttattctttgtgtacatagttat

SEQ ID NO: 13464 - DNA, 80 bp, synthetic construct
  misc_feature 1..80: note = Synthetic: >SBB-797-cand-6880-6959
  source 1..80: mol_type = other DNA
aggtatggttgtaacaatgtatcttgccttatgtgttataaaaagaatgtcgccaagcgcattgagtgttctactgtcgt

SEQ ID NO: 13465 - DNA, 80 bp, synthetic construct
  misc_feature 1..80: note = Synthetic: >SBB-747-cand-6870-6949
  source 1..80: mol_type = other DNA
tgttcatgtaaggtatggttgtaacaatgtatcttgccttatgtgttataaaaagaatgtcgctaagcgcattgagtgtt

SEQ ID NO: 13466 - DNA, 80 bp, synthetic construct
  misc_feature 1..80: note = Synthetic: >SBB-788-cand-12960-13039
  source 1..80: mol_type = other DNA
aacactaaagtagcaggatttggcttacatttaaagaataattgttgtagatatcaagaattggatgcagaaggcaacca

SEQ ID NO: 13467 - DNA, 80 bp, synthetic construct
  misc_feature 1..80: note = Synthetic: >SBB-726-cand-12950-13029
  source 1..80: mol_type = other DNA
tgacatttgtaacactaaagtagcaggatttggcttacatttaaagaataattgttgtagatatcaagaattggatgccg

SEQ ID NO: 13468 - DNA, 80 bp, synthetic construct
  misc_feature 1..80: note = Synthetic: >SBB-788-cand-8400-8479
  source 1..80: mol_type = other DNA
aaccagctcatgtgtgttggctgcaacatgcactttgttcgctagtgctaatggtgaacccgcaccttattgtgcggatg

SEQ ID NO: 13469 - DNA, 80 bp, synthetic construct
  misc_feature 1..80: note = Synthetic: >SBB-747-cand-8390-8469
  source 1..80: mol_type = other DNA
atgtttttgaaaccagctcatgtgtgttggctgcaacatgcactttgttcgctagtgctaatggtgaacccgcaccttat

SEQ ID NO: 13470 - DNA, 80 bp, synthetic construct
  misc_feature 1..80: note = Synthetic: >SBB-797-cand-8410-8489
  source 1..80: mol_type = other DNA
tgtgtgttggctgcaacatgcactttgttcgctagtgctaatggtgaacctgcaccttattgtgcggatgccttactgat

SEQ ID NO: 13471 - DNA, 80 bp, synthetic construct
  misc_feature 1..80: note = Synthetic: >SBB-010-cand-13000-13079
  source 1..80: mol_type = other DNA
aaccaggatttaaatggcaatttctatgattttggagattttgctaagtccttacctaatatgggagtcccgctttgtac

SEQ ID NO: 13472 - DNA, 80 bp, synthetic construct
  misc_feature 1..80: note = Synthetic: >SBB-024-cand-13010-13089
  source 1..80: mol_type = other DNA
taaatggcaatttctatgattttggagattttgctaaatcattacctaatatgggagtcccgctttgtacatcttattac

SEQ ID NO: 13473 - DNA, 80 bp, synthetic construct
  misc_feature 1..80: note = Synthetic: >SBB-041-cand-12990-13069
  source 1..80: mol_type = other DNA
tacactggataaccaggatttaaatggcaatttctatgattttggcgattttgccaaatctttacctaatatgggagtcc

SEQ ID NO: 13474 - DNA, 80 bp, synthetic construct
  misc_feature 1..80: note = Synthetic: >SBB-747-cand-5670-5749
  source 1..80: mol_type = other DNA
gcatatgggtaagccagttttgtttgtaacgcgccctaacacgtggaagaagttagtgccattgttatctacacttgttg

SEQ ID NO: 13475 - DNA, 80 bp, synthetic construct
  misc_feature 1..80: note = Synthetic: >SBB-797-cand-11600-11679
  source 1..80: mol_type = other DNA
aagctcttaagaaagctatgaatgtagctaagagtgtgctagataaagacattgccactactcgtaaattggagcgcatg

SEQ ID NO: 13476 - DNA, 80 bp, synthetic construct
  misc_feature 1..80: note = Synthetic: >SBB-747-cand-11590-11669
  source 1..80: mol_type = other DNA
tctacggtgaaagctcttaagaaagctatgaatgtagctaagagtgtgctagataaagacattgccactactcgtaaatt

SEQ ID NO: 13477 - DNA, 80 bp, synthetic construct
  misc_feature 1..80: note = Synthetic: >SBB-747-cand-9350-9429
  source 1..80: mol_type = other DNA
aagctgcttgttctcatttggttatggctttagaaaagtattctaatggtggtggtgataccatataccaaccacctcgc

SEQ ID NO: 13478 - DNA, 80 bp, synthetic construct
  misc_feature 1..80: note = Synthetic: >SBB-726-cand-9360-9439
  source 1..80: mol_type = other DNA
ttctcatttggttatggctttagaaaaatattctaatggtggtggtgataccatataccaaccacctcgctgtagcgtag

SEQ ID NO: 13479 - DNA, 80 bp, synthetic construct
  misc_feature 1..80: note = Synthetic: >SBB-747-cand-13110-13189
  source 1..80: mol_type = other DNA
aagcttaaggattgtggtgtagtagctcgccatgatttctttaagtttaatattgatggtgagatgacaccgcatgtgtc

SEQ ID NO: 13480 - DNA, 80 bp, synthetic construct
  misc_feature 1..80: note = Synthetic: >SBB-797-cand-13120-13199
  source 1..80: mol_type = other DNA
attgtggtgtagtagctcgccatgatttctttaagtttaatattgatggtgagatgacaccgcatgtgtcgcgtgagcgt

SEQ ID NO: 13481 - DNA, 80 bp, synthetic construct
  misc_feature 1..80: note = Synthetic: >SBB-122-cand-17870-17949
  source 1..80: mol_type = other DNA
gtgccattaacagtggaggccgcctcgtgcagcgtcacctcatgaaggcggctattaagttgtataatcccaaagctatc

SEQ ID NO: 13482 - DNA, 80 bp, synthetic construct
  misc_feature 1..80: note = Synthetic: >SBB-747-cand-12790-12869
  source 1..80: mol_type = other DNA
aatatgtggcagggatatggttgtccttgtgcaagtttaagagaagtcaatttacaggctaaagatgagtgctttttaaa

SEQ ID NO: 13483 - DNA, 80 bp, synthetic construct
  misc_feature 1..80: note = Synthetic: >SBB-788-cand-12800-12879
  source 1..80: mol_type = other DNA
agggatatggttgtccttgtgcaagtttaagagaagtcaatttacaggctaaagatgagtgctttttaaacgagttaggg

SEQ ID NO: 13484 - DNA, 80 bp, synthetic construct
  misc_feature 1..80: note = Synthetic: >SBB-041-cand-10830-10909
  source 1..80: mol_type = other DNA
aatcaaaacttactgacctaaagtgcactaatgttgtcttgcttggttgtctgtccagtatgaacatagcatctaacaca

SEQ ID NO: 13485 - DNA, 80 bp, synthetic construct
  misc_feature 1..80: note = Synthetic: >SBB-130-cand-10820-10899
  source 1..80: mol_type = other DNA
tctgtgcaatcaaaacttactgacctaaagtgcactaatgttgttctgcttggttgtttgtccagtatgaacatagcatc

SEQ ID NO: 13486 - DNA, 80 bp, synthetic construct
  misc_feature 1..80: note = Synthetic: >SBB-747-cand-13430-13509
  source 1..80: mol_type = other DNA
tatggtggagcaaggccttattggtgttttaaccctggataatcaggatttgaatggccaatggtatgattttggtgact

SEQ ID NO: 13487 - DNA, 80 bp, synthetic construct
  misc_feature 1..80: note = Synthetic: >SBB-797-cand-13440-13519
  source 1..80: mol_type = other DNA
caaggccttattggtgttttaaccctggataatcaggatttgaatggccaatggtacgactttggtgattttatagaggg

SEQ ID NO: 13488 - DNA, 80 bp, synthetic construct
  misc_feature 1..80: note = Synthetic: >SBB-122-cand-22560-22639
  source 1..80: mol_type = other DNA
ggtatacttgttataccacctattatggatgctgagacacttggcatgtacggtggcattgctgctgcttcagtttcatt

SEQ ID NO: 13489 - DNA, 80 bp, synthetic construct
  misc_feature 1..80: note = Synthetic: >SBB-797-cand-14880-14959
  source 1..80: mol_type = other DNA
ggtaccagtagtggtgattccacgactgcttatgctaacagtgtttttaacatttgtcaggctgttagtgctaatcttaa

SEQ ID NO: 13490 - DNA, 80 bp, synthetic construct
  misc_feature 1..80: note = Synthetic: >PDF-2386-cand-3200-3279
  source 1..80: mol_type = other DNA
gaggatgttgaagaacactctacacctcagaatcagttttctgattattataaaatcacagataatatcttcataaagtg

SEQ ID NO: 13491 - DNA, 80 bp, synthetic construct
  misc_feature 1..80: note = Synthetic: >SBB-122-cand-13600-13679
  source 1..80: mol_type = other DNA
cagactgttcagccagggcattttaataaggaattttatgactttttgaagtctcagggtttctttgaagaaggttctga

SEQ ID NO: 13492 - DNA, 80 bp, synthetic construct
  misc_feature 1..80: note = Synthetic: >SBB-130-cand-13590-13669
  source 1..80: mol_type = other DNA
gacgaaacagactgtgcagccagggcattttaataaggaattctatgactttttgaagtctcagggtttctttgaagaag

SEQ ID NO: 13493 - DNA, 80 bp, synthetic construct
  misc_feature 1..80: note = Synthetic: >SBB-041-cand-11230-11309
  source 1..80: mol_type = other DNA
ccatgaggcttctgtccagaagaaaatttctcgtatggcagagcaagcagcagcacaaatgtataaagaggctagggctg

SEQ ID NO: 13494 - DNA, 80 bp, synthetic construct
  misc_feature 1..80: note = Synthetic: >SBB-010-cand-11240-11319
  source 1..80: mol_type = other DNA
tctgtccagaagaaaatttctcgtatggcagagcaagcagcagcacaaatgtacaaagaggctagggctgttaatagaaa

SEQ ID NO: 13495 - DNA, 80 bp, synthetic construct
  misc_feature 1..80: note = Synthetic: >SBB-797-cand-400-479
  source 1..80: mol_type = other DNA
tatttgtgtcactcatctgtcactagtggggaccgtgtagttatcacggatagcacatggtgtaccactaattacggctg

SEQ ID NO: 13496 - DNA, 80 bp, synthetic construct
  misc_feature 1..80: note = Synthetic: >SBB-747-cand-390-469
  source 1..80: mol_type = other DNA
tgtgccacattatttgtgtcactcatctgttactagtggagaccgtgtagttatcacggatagcacatggtgtaccacta

SEQ ID NO: 13497 - DNA, 80 bp, synthetic construct
  misc_feature 1..80: note = Synthetic: >SBB-130-cand-22880-22959
  source 1..80: mol_type = other DNA
taatggcatcagtgaaaactttggtgccattagctctaatttcaagatcttgtcagaacgacttgacagacttgaggccg

SEQ ID NO: 13498 - DNA, 80 bp, synthetic construct
  misc_feature 1..80: note = Synthetic: >PDF-2386-cand-7680-7759
  source 1..80: mol_type = other DNA
tcaatttggagaacttaaaggctaacaacactaagggtgtgctacctattaacgttgttgtctttgatggcaagtctaag

SEQ ID NO: 13499 - DNA, 80 bp, synthetic construct
  misc_feature 1..80: note = Synthetic: >PDF-2370-cand-7200-7279
  source 1..80: mol_type = other DNA
cttggcttatgtggttagtggtgaatgtagttcaaatggcacccatttctgctatggttagaatgtatatattctttgcc

SEQ ID NO: 13500 - DNA, 80 bp, synthetic construct
  misc_feature 1..80: note = Synthetic: >SBB-130-cand-810-889
  source 1..80: mol_type = other DNA
ttacctggtgtggtagtatcccacacactttacctgatggtactactacaactgtggcaaccccagtgcgtaggaacaag

SEQ ID NO: 13501 - DNA, 80 bp, synthetic construct
  misc_feature 1..80: note = Synthetic: >SBB-120-cand-820-899
  source 1..80: mol_type = other DNA
tggtagtatcccacacactttacctgatggtactactacaactgtagccaacccagtgcgtaagaataaagctgtgatgc

SEQ ID NO: 13502 - DNA, 80 bp, synthetic construct
  misc_feature 1..80: note = Synthetic: >SBB-010-cand-810-889
  source 1..80: mol_type = other DNA
ttacttggtgtggtagtatcccacacactttacctgatggtactactacaactgtggcaaacccagtgcgtaagaacaag

SEQ ID NO: 13503 - DNA, 80 bp, synthetic construct
  misc_feature 1..80: note = Synthetic: >SBB-041-cand-3640-3719
  source 1..80: mol_type = other DNA
gttgcacacaatgttaatacattgttctgttgagtgcaagtgtggtcaatcctatgaggatcttagtggctgcgtgtttc

SEQ ID NO: 13504 - DNA, 80 bp, synthetic construct
  misc_feature 1..80: note = Synthetic: >SBB-010-cand-3630-3709
  source 1..80: mol_type = other DNA
tgctttgtgagttgcacacaatgttaatacattgttctgttgagtgcaagtgtggtcaatcatatgaggatctcagtggc

SEQ ID NO: 13505 - DNA, 80 bp, synthetic construct
  misc_feature 1..80: note = Synthetic: >PRD-0038-cand-19590-19669
  source 1..80: mol_type = other DNA
ggagatctttgagaataagactacactacctgttaatgttgcttttgagctttgggccaagcgtagcattaagcctgttc

SEQ ID NO: 13506 - DNA, 80 bp, synthetic construct
  misc_feature 1..80: note = Synthetic: >PDF-2386-cand-19600-19679
  source 1..80: mol_type = other DNA
gagaataagaccacactacctgttaatgttgcttttgagctttgggccaagcgtagcattaagcctgttccagaaacaaa

SEQ ID NO: 13507 - DNA, 80 bp, synthetic construct
  misc_feature 1..80: note = Synthetic: >PRD-0038-cand-9120-9199
  source 1..80: mol_type = other DNA
gtaggtgggttcttaataatgattattatagatccctgcctggtgtcttttgtggtgttgatgcgctagacttagtcttc

SEQ ID NO: 13508 - DNA, 80 bp, synthetic construct
  misc_feature 1..80: note = Synthetic: >229E-cand-14080-14159
  source 1..80: mol_type = other DNA
agacgctatgtttgcgttaacaaagcgtaatattctccctactatgactcagttaaatctcaaatacgccatatctggta

SEQ ID NO: 13509 - DNA, 80 bp, synthetic construct
  misc_feature 1..80: note = Synthetic: >229E-cand-14160-14239
  source 1..80: mol_type = other DNA
aggagcgagcacgtacagttggtggtgtctctttgttagctactatgactactagacagtttcatcagaaatgtttgaaa

SEQ ID NO: 13510 - DNA, 80 bp, synthetic construct
  misc_feature 1..80: note = Synthetic: >229E-cand-14240-14319
  source 1..80: mol_type = other DNA
tctatagttgctactagaaatgccaccgttgttatcggcactaccaaattctatggcggttgggacaatatgctaaagaa

SEQ ID NO: 13511 - DNA, 80 bp, synthetic construct
  misc_feature 1..80: note = Synthetic: >229E-cand-14320-14399
  source 1..80: mol_type = other DNA
cttgattgctgacgttgacgatcctaagttgatgggctgggactatcctaagtgtgatagagctatgccttcaatgattc

SEQ ID NO: 13512 - DNA, 80 bp, synthetic construct
  misc_feature 1..80: note = Synthetic: >229E-cand-14400-14479
  source 1..80: mol_type = other DNA
gtatgctgtcggccatgattttaggttctaaacatgttacatgttgtacggctagtgacaaattctatagacttagtaat

SEQ ID NO: 13513 - DNA, 80 bp, synthetic construct
  misc_feature 1..80: note = Synthetic: >229E-cand-14480-14559
  source 1..80: mol_type = other DNA
gagcttgctcaagttttaaccgaagttgtttactcaaatggtgggttttattttaaacctggtggtacaacttctggtga

SEQ ID NO: 13514 - DNA, 80 bp, synthetic construct
  misc_feature 1..80: note = Synthetic: >229E-cand-14560-14639
  source 1..80: mol_type = other DNA
tgcaactactgcttatgccaactctgtttttaatatatttcaggctgtaagttctaacattaatcgcattttgagcgtta

SEQ ID NO: 13515 - DNA, 80 bp, synthetic construct
  misc_feature 1..80: note = Synthetic: >229E-cand-14640-14719
  source 1..80: mol_type = other DNA
actcgtcaaattgcaacaatcttaatgttaagaaattacagaaacaactttatgacaattgctatagaaatagtaatgtc

SEQ ID NO: 13516 - DNA, 80 bp, synthetic construct
  misc_feature 1..80: note = Synthetic: >229E-cand-14720-14799
  source 1..80: mol_type = other DNA
gatgagtcttttgtggatgacttctacggttatttacaaaagcacttttctatgatgattctttctgatgatggtgttgt

SEQ ID NO: 13517 - DNA, 80 bp, synthetic construct
  misc_feature 1..80: note = Synthetic: >229E-cand-14900-14979
  source 1..80: mol_type = other DNA
aaatgttggactgaggaagacctttctgtaggacctcatgaattttgctcacagcacactatgcagattgtagatgaaaa

SEQ ID NO: 13518 - DNA, 80 bp, synthetic construct
  misc_feature 1..80: note = Synthetic: >229E-cand-15060-15139
  source 1..80: mol_type = other DNA
atgctgtcattcttttagaacgctatgtttctctggctatagatgcatacccattgtctaaacatcctaaacccgagtat

SEQ ID NO: 13519 - DNA, 80 bp, synthetic construct
  misc_feature 1..80: note = Synthetic: >229E-cand-15220-15299
  source 1..80: mol_type = other DNA
tgtcacacttttagatgaacaagagtccaagttttgggatgaaagcttttatgctagcatgtatgagaagtctacagtac

SEQ ID NO: 13520 - DNA, 80 bp, synthetic construct
  misc_feature 1..80: note = Synthetic: >AlphaCoV1-cand-8330-8409
  source 1..80: mol_type = other DNA
attttacaacacaagctttatagtgaattgatgcctgattattattatgagcatgctagtggtaacatggttaaaatacc

SEQ ID NO: 13521 - DNA, 80 bp, synthetic construct
  misc_feature 1..80: note = Synthetic: >AlphaCoV1-cand-8410-8489
  source 1..80: mol_type = other DNA
agcaattattaggggatttggtctacgatttgtaaaaacacaggctacaacttattgcagagtgggagagtgtattgaaa

SEQ ID NO: 13522 - DNA, 80 bp, synthetic construct
  misc_feature 1..80: note = Synthetic: >AlphaCoV1-cand-8490-8569
  source 1..80: mol_type = other DNA
gtcaagctggtttttgctttggtggtgataactggtttgtctatgacaaagagtttggtgatggatacatttgtggtagt

SEQ ID NO: 13523 - DNA, 80 bp, synthetic construct
  misc_feature 1..80: note = Synthetic: >AlphaCoV1-cand-8570-8649
  source 1..80: mol_type = other DNA
tctgtactgggattcttcaaaaatgtcttcgcactctttaactctaacatgtctgtggtagctacatctggtgcaatgtt

SEQ ID NO: 13524 - DNA, 80 bp, synthetic construct
  misc_feature 1..80: note = Synthetic: >AlphaCoV1-cand-8650-8729
  source 1..80: mol_type = other DNA
ggctaacattattattgcatgcttagctattgcagtctgttatggtgttcttaagtttaaaaagatttttggtgattgca

SEQ ID NO: 13525 - DNA, 80 bp, synthetic construct
  misc_feature 1..80: note = Synthetic: >AlphaCoV1-cand-8730-8809
  source 1..80: mol_type = other DNA
ctctcctagttgttatgattattgttacattggttgttaataatgtttcttactttgtcacccaaaacacattctttatg

SEQ ID NO: 13526 - DNA, 80 bp, synthetic construct
  misc_feature 1..80: note = Synthetic: >AlphaCoV1-cand-8810-8889
  source 1..80: mol_type = other DNA
attgtttatgccattgtttattatttcacaacaagaaaacttgcatacccaggcattttagatgctgggttcattattgc

SEQ ID NO: 13527 - DNA, 80 bp, synthetic construct
  misc_feature 1..80: note = Synthetic: >AlphaCoV1-cand-8890-8969
  source 1..80: mol_type = other DNA
atatattaatatggctccatggtatgtgcttgttgtgtatataatggtattcctttatgactcactaccatcactattca

SEQ ID NO: 13528 - DNA, 80 bp, synthetic construct
  misc_feature 1..80: note = Synthetic: >AlphaCoV1-cand-9130-9209
  source 1..80: mol_type = other DNA
gtataagtactatactggttcaatgggagaggctgattaccgcatggcttgctatgctcatttgggtaaagctttaatgg

SEQ ID NO: 13529 - DNA, 80 bp, synthetic construct
  misc_feature 1..80: note = Synthetic: >AlphaCoV1-cand-9210-9289
  source 1..80: mol_type = other DNA
attattctgtttcaagaaatgacatgctttacacaccaccaactgtcagtgttaattcaacacttcagtctggattgaga

SEQ ID NO: 13530 - DNA, 80 bp, synthetic construct
  misc_feature 1..80: note = Synthetic: >AlphaCoV1-cand-9290-9369
  source 1..80: mol_type = other DNA
aaaatggcacagcctagtggtattgtagaaccctgcattgtaagggtggcctatggtaacaatgtgcttaatggtttatg

SEQ ID NO: 13531 - DNA, 80 bp, synthetic construct
  misc_feature 1..80: note = Synthetic: >AlphaCoV1-cand-9370-9449
  source 1..80: mol_type = other DNA
gttaggagatgaagtcatttgccctagacatgtcattgctagtgatacatcacgtgttatcaactatgaaaatgagttgt

SEQ ID NO: 13532 - DNA, 80 bp, synthetic construct
  misc_feature 1..80: note = Synthetic: >AlphaCoV1-cand-9530-9609
  source 1..80: mol_type = other DNA
aatcttgtacttaaagtgaatcaggttaaccctaacacaccagaacataaatttaagtctgtgaaacctggtgagagttt

SEQ ID NO: 13533 - DNA, 80 bp, synthetic construct
  misc_feature 1..80: note = Synthetic: >AlphaSp-cand-17060-17139
  source 1..80: mol_type = other DNA
ggctcatgctagtaacgttaataggtttaatgttgctataactagagctaagaagggtatcttgtgtattatgtgtgatc

SEQ ID NO: 13534 - DNA, 80 bp, synthetic construct
  misc_feature 1..80: note = Synthetic: >AlphaSp-cand-17380-17459
  source 1..80: mol_type = other DNA
acattaatgtgccaaaccaacacacgttgttttgcactcgtgattttgcgatgcgtaacgttaggggttggctaggtttt

SEQ ID NO: 13535 - DNA, 80 bp, synthetic construct
  misc_feature 1..80: note = Synthetic: >AlphaSp-cand-17460-17539
  source 1..80: mol_type = other DNA
gatgtcgaaggtgctcatgttattggtagcaatgttggtactaatgttccactacaattgggtttttccaatggtgttga

SEQ ID NO: 13536 - DNA, 80 bp, synthetic construct
  misc_feature 1..80: note = Synthetic: >AlphaSp-cand-17620-17699
  source 1..80: mol_type = other DNA
gcgaacaatttacgcatttgttacctttgttgcgtaaaggtcaaccatggtctgttatcaggcgtcgtattgttcagatg

SEQ ID NO: 13537 - DNA, 80 bp, synthetic construct
  misc_feature 1..80: note = Synthetic: >Anlong-cand-13710-13789
  source 1..80: mol_type = other DNA
ctggatatttgtcaagcacgtgtcacgtacaaaatagtgtcacgctatttcgactgctatgagggtggttgtataactgc

SEQ ID NO: 13538 - DNA, 80 bp, synthetic construct
  misc_feature 1..80: note = Synthetic: >Anlong-cand-13790-13869
  source 1..80: mol_type = other DNA
caaagaagtggttgtgaccaatcttaataagagtgctggttggcctcttaacaagtttggtaaggctggattgtactatg

SEQ ID NO: 13539 - DNA, 80 bp, synthetic construct
  misc_feature 1..80: note = Synthetic: >Anlong-cand-13870-13949
  source 1..80: mol_type = other DNA
agtcgttgtcatatgaagaacaagaccaactctatgctgttacaaagcgcaacatcctgcccactatgacacagcttaat

SEQ ID NO: 13540 - DNA, 80 bp, synthetic construct
  misc_feature 1..80: note = Synthetic: >Anlong-cand-13950-14029
  source 1..80: mol_type = other DNA
cttaagtatgccattagtggtaaggaacgcgcacgtactgtaggaggtgtgtcactactatcaactatgacaacacgtca

SEQ ID NO: 13541 - DNA, 80 bp, synthetic construct
  misc_feature 1..80: note = Synthetic: >Anlong-cand-14030-14109
  source 1..80: mol_type = other DNA
gtaccaccaaaagcacttgaaatctattgtcaacactcgcaatgcagctgttgttataggtactaccaagttttatggtg

SEQ ID NO: 13542 - DNA, 80 bp, synthetic construct
  misc_feature 1..80: note = Synthetic: >Anlong-cand-14110-14189
  source 1..80: mol_type = other DNA
gttgggataatatgttaaacaatctgatctcaggtgttgagaatcctcatctgatgggttgggattatccaaagtgtgac

SEQ ID NO: 13543 - DNA, 80 bp, synthetic construct
  misc_feature 1..80: note = Synthetic: >Anlong-cand-14190-14269
  source 1..80: mol_type = other DNA
cgtgcattgcctaacatgattaggatgatttctgcaatgatactgggttctaaacacactacatgttgcacaggtactga

SEQ ID NO: 13544 - DNA, 80 bp, synthetic construct
  misc_feature 1..80: note = Synthetic: >Anlong-cand-14270-14349
  source 1..80: mol_type = other DNA
tcgttattacagactttgcaatgagctggcacaagtgctgacagaggttgtttactccaatggtggtttctatatgaaac

SEQ ID NO: 13545 - DNA, 80 bp, synthetic construct
  misc_feature 1..80: note = Synthetic: >Anlong-cand-14350-14429
  source 1..80: mol_type = other DNA
ctggtggtacaacttctggtgatgccactacagcttatgctaattctgtttttaacatctttcaggctactagtgcaaac

SEQ ID NO: 13546 - DNA, 80 bp, synthetic construct
  misc_feature 1..80: note = Synthetic: >Anlong-cand-14430-14509
  source 1..80: mol_type = other DNA
attaacagacttctcagtgttgatagtaacaattgtaacaatcttggtgttaaatctttgcagcgacgtttgtatgactg

SEQ ID NO: 13547 - DNA, 80 bp, synthetic construct
  misc_feature 1..80: note = Synthetic: >Anlong-cand-14510-14589
  source 1..80: mol_type = other DNA
ttgctacaggtctgcacacgttgatgacgagtttgttactgattactacaactatctgcggaagcacttttctctgatga

SEQ ID NO: 13548 - DNA, 80 bp, synthetic construct
  misc_feature 1..80: note = Synthetic: >Anlong-cand-14590-14669
  source 1..80: mol_type = other DNA
ttttgtcggacgatggtgttgtctgttataatagtgagtatgcatctcttggttatgttgctgacattagtgcattcaag

SEQ ID NO: 13549 - DNA, 80 bp, synthetic construct
  misc_feature 1..80: note = Synthetic: >Anlong-cand-14670-14749
  source 1..80: mol_type = other DNA
gctactttgtactatcagaacaatgtgttcatgagtactgctaagtgttgggttgaacccgatattagcaaggggccaca

SEQ ID NO: 13550 - DNA, 80 bp, synthetic construct
  misc_feature 1..80: note = Synthetic: >Anlong-cand-14750-14829
  source 1..80: mol_type = other DNA
tgagttttgctctcagcatactatgcaaatagttgaccaagatggtaagtattacttgccttacccagatccatccagaa

SEQ ID NO: 13551 - DNA, 80 bp, synthetic construct
  misc_feature 1..80: note = Synthetic: >Anlong-cand-14830-14909
  source 1..80: mol_type = other DNA
ttttgtcagcaggtgtttttgttgatgatatagtcaagactgaccccgttattttaatggaacgttatgtctcactggct

SEQ ID NO: 13552 - DNA, 80 bp, synthetic construct
  misc_feature 1..80: note = Synthetic: >Anlong-cand-14910-14989
  source 1..80: mol_type = other DNA
attgatgcatacccattgtctaagcatgacaatccagaataccgtaaggttttctatgctctgctagattgggtcaaaca

SEQ ID NO: 13553 - DNA, 80 bp, synthetic construct
  misc_feature 1..80: note = Synthetic: >BetaSp-cand-30940-31019
  source 1..80: mol_type = other DNA
gccaaggaaataaaacagaaaattctcaacaaaccccgccaaaagcggacgcccaataagcagtgcactgttcaacagtg

SEQ ID NO: 13554 - DNA, 80 bp, synthetic construct
  misc_feature 1..80: note = Synthetic: >BetaSp-cand-31020-31099
  source 1..80: mol_type = other DNA
tttcggcaaaaggggccccagccagaattttggtggtggtagcatgcttaaattgggaactagtgatccacagttcccca

SEQ ID NO: 13555 - DNA, 80 bp, synthetic construct
  misc_feature 1..80: note = Synthetic: >BetaSp-cand-31100-31179
  source 1..80: mol_type = other DNA
tccttgcagaattggcccccacagcgggagcctttttctttgggtccaggttggaattggccaaagttaataatatgtct

SEQ ID NO: 13556 - DNA, 80 bp, synthetic construct
  misc_feature 1..80: note = Synthetic: >BetaSp-cand-31180-31259
  source 1..80: mol_type = other DNA
ggtgctgctgatgagcctcagaaggatgtttatgagctgcgctattctggtgcaataagatttgatagcaccctacctgg

SEQ ID NO: 13557 - DNA, 80 bp, synthetic construct
  misc_feature 1..80: note = Synthetic: >BetaSp-cand-31260-31339
  source 1..80: mol_type = other DNA
gtttgagactatcatgaaagttatgaatgaaaatttggatgcgtaccaaaaccacacagaagagggtgcgcaattattga

SEQ ID NO: 13558 - DNA, 80 bp, synthetic construct
  misc_feature 1..80: note = Synthetic: >BetaSp-cand-31340-31419
  source 1..80: mol_type = other DNA
gcccaaaatttcagcgcaagcagaagaaagggcaagcggctcaacatattgaaaaggataatgtgagtgctgcaacgccc

SEQ ID NO: 13559 - DNA, 80 bp, synthetic construct
  misc_feature 1..80: note = Synthetic: >BetaSp-cand-31740-31819
  source 1..80: mol_type = other DNA
agccagcatgttaagtgatctaggaatagattagtagatggatgaaggtaatcatgaccaattggaagaatcaagcatat

SEQ ID NO: 13560 - DNA, 80 bp, synthetic construct
  misc_feature 1..80: note = Synthetic: >BtCoV_008_16-cand-0-79
  source 1..80: mol_type = other DNA
gtttgtctatgttcggatagtgcgtctctttctctagactcttgtctactcaattcaactaaacgaaattttatccttct

SEQ ID NO: 13561 - DNA, 80 bp, synthetic construct
  misc_feature 1..80: note = Synthetic: >BtCoV_008_16-cand-80-159
  source 1..80: mol_type = other DNA
gtccacatgtccatgtgggcagaagttgatgtgaaatttcactaggtttgcttagtagctattgcaagtgctgtgctgtc

SEQ ID NO: 13562 - DNA, 80 bp, synthetic construct
  misc_feature 1..80: note = Synthetic: >BtCoV_008_16-cand-160-239
  source 1..80: mol_type = other DNA
ctcagctcttggggtgtgttccgtcacaccttcaatctgacaaacagcctcctgcctgttccgtcaggtgggtgtgtgaa

SEQ ID NO: 13563 - DNA, 80 bp, synthetic construct
  misc_feature 1..80: note = Synthetic: >BtCoV_008_16-cand-240-319
  source 1..80: mol_type = other DNA
tagtgtgttccgtcacacttgaaaccagtaactgccagctatgtccagcaaccaattgacgttggcctttgccaacgatc

SEQ ID NO: 13564 - DNA, 80 bp, synthetic construct
  misc_feature 1..80: note = Synthetic: >BtCoV_008_16-cand-320-399
  source 1..80: mol_type = other DNA
cagaaatttcagctttgggctttgccagctctagtgaagccgtctcattctacagtgaggccgcgactagaggttttgtg

SEQ ID NO: 13565 - DNA, 80 bp, synthetic construct
  misc_feature 1..80: note = Synthetic: >BtCoV_008_16-cand-2990-3069
  source 1..80: mol_type = other DNA
caatagaccctgtgcataaggtgcgtctcgagtttgaattcgaggatgatactcttatgcagatttgttccaagatagcc

SEQ ID NO: 13566 - DNA, 80 bp, synthetic construct
  misc_feature 1..80: note = Synthetic: >BtCoV_008_16-cand-3070-3149
  source 1..80: mol_type = other DNA
ggtacatccataaaaattaccggtggttgggacaaattgcttgacacaattgatgtagccatggctttggttaaagaata

SEQ ID NO: 13567 - DNA, 80 bp, synthetic construct
  misc_feature 1..80: note = Synthetic: >BtCoV_008_16-cand-3150-3229
  source 1..80: mol_type = other DNA
tgttgatgttcctacctattttgtctatgacgaacaaggtggtacagacataagtcttccagttatggtttctcaatggc

SEQ ID NO: 13568 - DNA, 80 bp, synthetic construct
  misc_feature 1..80: note = Synthetic: >BtCoV_008_16-cand-3230-3309
  source 1..80: mol_type = other DNA
cattgtcagaacagggcgaagagccacaatcccaaccctctgatgaatcggaggttgagagcgattgtgacagtttagag

SEQ ID NO: 13569 - DNA, 80 bp, synthetic construct
  misc_feature 1..80: note = Synthetic: >BtCoV_008_16-cand-3310-3389
  source 1..80: mol_type = other DNA
gctgctgagtctaagtctgatgatcaacttgaagttgagcaggcattagattatatggccgacgtagcacctgtgacacc

SEQ ID NO: 13570 - DNA, 80 bp, synthetic construct
  misc_feature 1..80: note = Synthetic: >BtCoV_008_16-cand-3390-3469
  source 1..80: mol_type = other DNA
acctaaggacttgtttgcatttgatttcgccaattatggtgggctcaaggttctcaacttgcagcagaacaattgttggg

SEQ ID NO: 13571 - DNA, 80 bp, synthetic construct
  misc_feature 1..80: note = Synthetic: >BtCoV_008_16-cand-3470-3549
  source 1..80: mol_type = other DNA
tggcgtctgcacttatacaaattcagcttttggaccttcttgacgatccagttatggaactttttaaagttggacgtgtt

SEQ ID NO: 13572 - DNA, 80 bp, synthetic construct
  misc_feature 1..80: note = Synthetic: >BtCoV_008_16-cand-3560-3639
  source 1..80: mol_type = other DNA
tcaagaagtgctatgaagttgaaggtgctatccttggttctctaggtgacacttcctcatgtttggagaagttgttgaaa

SEQ ID NO: 13573 - DNA, 80 bp, synthetic construct
  misc_feature 1..80: note = Synthetic: >BtCoV_008_16-cand-3640-3719
  source 1..80: mol_type = other DNA
cataaggatagtcttactgttaagtgtagtgtgacctgtgattgtggtgttagtgaacgcatttataaggctgcaacctt

SEQ ID NO: 13574 - DNA, 80 bp, synthetic construct
  misc_feature 1..80: note = Synthetic: >BtCoV_008_16-cand-3720-3799
  source 1..80: mol_type = other DNA
gcgtatgactcctactatggacccgttctcttatggcgcttgtcccaattgtgcacaggcgttaatacatacgtttgtgt

SEQ ID NO: 13575 - DNA, 80 bp, synthetic construct
  misc_feature 1..80: note = Synthetic: >BtCoV_008_16-cand-3800-3879
  source 1..80: mol_type = other DNA
caattaaaggtactggtgtcttttgtagagaacctactgaattagatgttgagcaattggtggtcaaacccatttgtgcc

SEQ ID NO: 13576 - DNA, 80 bp, synthetic construct
  misc_feature 1..80: note = Synthetic: >BtCoV_008_16-cand-3880-3959
  source 1..80: mol_type = other DNA
tcggcctatgttggagccaaggacaatggtcactatttgactaacatttatagttgtgctatgagtgttgatggtaatgg

SEQ ID NO: 13577 - DNA, 80 bp, synthetic construct
  misc_feature 1..80: note = Synthetic: >BtCoV_008_16-cand-3960-4039
  source 1..80: mol_type = other DNA
tcgccaccctataactcattcaacacttaacactatttgtgttaaggatgttgactggaaaaaacctatagaagttacac

SEQ ID NO: 13578 - DNA, 80 bp, synthetic construct
  misc_feature 1..80: note = Synthetic: >BtCoV_008_16-cand-4040-4119
  source 1..80: mol_type = other DNA
ctttaccgactcaacccactccttttattacgtttaagaatgtggagttttatcaaggtgattttaaggaccttattgca

SEQ ID NO: 13579 - DNA, 80 bp, synthetic construct
  misc_feature 1..80: note = Synthetic: >BtCoV_008_16-cand-4120-4199
  source 1..80: mol_type = other DNA
gtgccacatgactttgttgttaatgctgctaatgagaaactttctcatggtggtggtatagctcttgctatagacaccta

SEQ ID NO: 13580 - DNA, 80 bp, synthetic construct
  misc_feature 1..80: note = Synthetic: >BtCoV_008_16-cand-4200-4279
  source 1..80: mol_type = other DNA
cactggcggtttgctacaacgtttgtctgactcacatattaggacgcatggtagccttaaggttggtgctggtgtgatgc

SEQ ID NO: 13581 - DNA, 80 bp, synthetic construct
  misc_feature 1..80: note = Synthetic: >HKU1-cand-3220-3299
  source 1..80: mol_type = other DNA
atgttgttactggtgacaatgacgatgaagatgttgttactggtgacaatgacgatgaagatgttgttactggtgacaat

SEQ ID NO: 13582 - DNA, 80 bp, synthetic construct
  misc_feature 1..80: note = Synthetic: >HKU1-cand-3540-3619
  source 1..80: mol_type = other DNA
gacgatgaagatgttgttactggtgacaatgacgatgaagagattgttactggtgacaatgacgatgaagatgttgttac

SEQ ID NO: 13583 - DNA, 80 bp, synthetic construct
  misc_feature 1..80: note = Synthetic: >HKU1-cand-3620-3699
  source 1..80: mol_type = other DNA
tggtgacaatgacgatgaagatgtcgttactggtgacaatgaccaaattgttgttactggtgatgatgtagatgatattg

SEQ ID NO: 13584 - DNA, 80 bp, synthetic construct
  misc_feature 1..80: note = Synthetic: >HKU1-cand-3700-3779
  source 1..80: mol_type = other DNA
acactattaattgtgaaagtatttatgactttgatacttataaagctcttttagtttttaatgatgtctataatgatgct

SEQ ID NO: 13585 - DNA, 80 bp, synthetic construct
  misc_feature 1..80: note = Synthetic: >HKU1-cand-3780-3859
  source 1..80: mol_type = other DNA
ttgtttgttagttatggttctagtgttgaaacagaaacatattttaaagttaatggtttatggtcacctactattacaca

SEQ ID NO: 13586 - DNA, 80 bp, synthetic construct
  misc_feature 1..80: note = Synthetic: >HKU1-cand-3860-3939
  source 1..80: mol_type = other DNA
tactaactgttggttgcgttctgtgttacttgtaatgcagaaattaccttttaagtttaaggatttagctattgaaaata

SEQ ID NO: 13587 - DNA, 80 bp, synthetic construct
  misc_feature 1..80: note = Synthetic: >HKU1-cand-3940-4019
  source 1..80: mol_type = other DNA
tgtggttatcttataaggtgggttataatcaaagttttgttgattatttactgaccactattcctaaagctattgttttg

SEQ ID NO: 13588 - DNA, 80 bp, synthetic construct
  misc_feature 1..80: note = Synthetic: >HKU1-cand-4020-4099
  source 1..80: mol_type = other DNA
cctcaaggtggttttgtagctgattttgcttattggtttttaaaccagtttgatattaatgcgtatgctaattggtgttg

SEQ ID NO: 13589 - DNA, 80 bp, synthetic construct
  misc_feature 1..80: note = Synthetic: >HKU1-cand-4100-4179
  source 1..80: mol_type = other DNA
tttaaaatgtggtttttcttttgatttaaatggtttggatgctgtgtttttttatggagatattgtgtctcatgtttgta

SEQ ID NO: 13590 - DNA, 80 bp, synthetic construct
  misc_feature 1..80: note = Synthetic: >HKU1-cand-4180-4259
  source 1..80: mol_type = other DNA
agtgtggacataatatgactctaatagcagcggacttaccttgtacattacatttttcattatttgatgacaatttttgt

SEQ ID NO: 13591 - DNA, 80 bp, synthetic construct
  misc_feature 1..80: note = Synthetic: >HKU1-cand-4260-4339
  source 1..80: mol_type = other DNA
gctttttgcacccctaaaaaaatttttattgctgcatgtgctgtggatgtaaacgtttgtcattctgtagctgttatagg

SEQ ID NO: 13592 - DNA, 80 bp, synthetic construct
  misc_feature 1..80: note = Synthetic: >HKU1-cand-4340-4419
  source 1..80: mol_type = other DNA
tgatgaacaaatagatggtaagtttgttactaaatttagtggtgataaatttgattttatagtaggttatggaatgtcat

SEQ ID NO: 13593 - DNA, 80 bp, synthetic construct
  misc_feature 1..80: note = Synthetic: >HKU1-cand-4420-4499
  source 1..80: mol_type = other DNA
ttagtatgtcttcttttgagttagctcaattgtatggtttgtgtataacacctaatgtatgttttgttaaaggtgatatt

SEQ ID NO: 13594 - DNA, 80 bp, synthetic construct
  misc_feature 1..80: note = Synthetic: >HKU1-cand-12200-12279
  source 1..80: mol_type = other DNA
aaattgtttacagcatttgcatgttgcttctaattctaagttgtggcagtattgtagtgttttacataatgaaatactat

SEQ ID NO: 13595 - DNA, 80 bp, synthetic construct
  misc_feature 1..80: note = Synthetic: >HKU1-cand-12280-12359
  source 1..80: mol_type = other DNA
ctacttcagatttgagtgtagcttttgataagcttgctcaattattgattgttttattcgccaatcctgctgcagttgat

SEQ ID NO: 13596 - DNA, 80 bp, synthetic construct
  misc_feature 1..80: note = Synthetic: >HKU1-cand-12360-12439
  source 1..80: mol_type = other DNA
actaagtgtcttgcaagtatagatgaagttagcgatgattatgttcaagatagtaccgttttgcaggctttgcaaagtga

SEQ ID NO: 13597 - DNA, 80 bp, synthetic construct
  misc_feature 1..80: note = Synthetic: >HKU1-cand-12440-12519
  source 1..80: mol_type = other DNA
gtttgtaaatatggctagttttgttgaatatgaagtcgcaaagaaaaatttggctgatgctaaaaatagtggttctgtta

SEQ ID NO: 13598 - DNA, 80 bp, synthetic construct
  misc_feature 1..80: note = Synthetic: >HKU1-cand-12520-12599
  source 1..80: mol_type = other DNA
atcaacaacagataaaacagttagaaaaagcatgtaatatagctaagtctgtgtatgaacgcgataaagctgtagctcgc

SEQ ID NO: 13599 - DNA, 80 bp, synthetic construct
  misc_feature 1..80: note = Synthetic: >HKU1-cand-12600-12679
  source 1..80: mol_type = other DNA
aaacttgaacgtatggcagacctagcacttactaacatgtataaagaggctcggattaatgataagaagagtaaagttgt

SEQ ID NO: 13600 - DNA, 80 bp, synthetic construct
  misc_feature 1..80: note = Synthetic: >HKU1-cand-12680-12759
  source 1..80: mol_type = other DNA
ttccgctttgcagacaatgctttttagcatggttcgtaaattggataatcaggctttaaattctattctggataatgctg

SEQ ID NO: 13601 - DNA, 80 bp, synthetic construct
  misc_feature 1..80: note = Synthetic: >HKU1-cand-12760-12839
  source 1..80: mol_type = other DNA
ttaaaggttgtgtacctttgagtgctattccagcattggctgctaatactttaactataataataccagataaacaagtt

SEQ ID NO: 13602 - DNA, 80 bp, synthetic construct
  misc_feature 1..80: note = Synthetic: >HKU1-cand-12840-12919
  source 1..80: mol_type = other DNA
tttgataaagttgttgataatgtttatgttacatatgctggtagtgtatggcatatacagactgttcaagatgctgatgg

SEQ ID NO: 13603 - DNA, 80 bp, synthetic construct
  misc_feature 1..80: note = Synthetic: >HKU1-cand-12930-13009
  source 1..80: mol_type = other DNA
cagttaactgatattagtgttgattctaattggcctcttgttatcattgctaacaggtataatgaagttgctaatgctgt

SEQ ID NO: 13604 - DNA, 80 bp, synthetic construct
  misc_feature 1..80: note = Synthetic: >HKU1-cand-13010-13089
  source 1..80: mol_type = other DNA
tatgcagaataatgagttgatgcctcataaattaaaaatacaagttgttaatagtggttctgatatgaattgtaatattc

SEQ ID NO: 13605 - DNA, 80 bp, synthetic construct
  misc_feature 1..80: note = Synthetic: >HKU1-cand-13090-13169
  source 1..80: mol_type = other DNA
ctactcaatgttattataataatggtagtagtggtagaatagtttatgctgttcttagtgatgttgatggtcttaagtat

SEQ ID NO: 13606 - DNA, 80 bp, synthetic construct
  misc_feature 1..80: note = Synthetic: >HKU1-cand-13170-13249
  source 1..80: mol_type = other DNA
actaagataatgaaagatgatggaaattgtgttgttttagagcttgatcctccttgtaaattttctatacaagatgttaa

SEQ ID NO: 13607 - DNA, 80 bp, synthetic construct
  misc_feature 1..80: note = Synthetic: >HKU1-cand-13250-13329
  source 1..80: mol_type = other DNA
gggacttaaaattaagtatctttattttattaaaggatgtaacactttagctagagggtgggttgttggtactttatctt

SEQ ID NO: 13608 - DNA, 80 bp, synthetic construct
  misc_feature 1..80: note = Synthetic: >HKU1-cand-13330-13409
  source 1..80: mol_type = other DNA
caacaattagattgcaggctggtgttgctactgagtatgcagctaattcttctatactttcattatgtgcattttctgta

SEQ ID NO: 13609 - DNA, 80 bp, synthetic construct
  misc_feature 1..80: note = Synthetic: >HKU1-cand-13410-13489
  source 1..80: mol_type = other DNA
gatcctaagaaaacttatttagattatatacaacaaggtggtgtacctataattaattgtgttaaaatgctctgtgatca

SEQ ID NO: 13610 - DNA, 80 bp, synthetic construct
  misc_feature 1..80: note = Synthetic: >HKU15-cand-12970-13049
  source 1..80: mol_type = other DNA
ttgagtatacaaaacgcaatgttttgcctacactcactcagatgaaccttaagtatgcaatttcagccaaggatcgtgct

SEQ ID NO: 13611 - DNA, 80 bp, synthetic construct
  misc_feature 1..80: note = Synthetic: >HKU15-cand-13290-13369
  source 1..80: mol_type = other DNA
tcgtgcttgctagcacgaaaacacacttgctgtaaccaaagccagcgattctaccgtttggctaatgaatgttgccaagt

SEQ ID NO: 13612 - DNA, 80 bp, synthetic construct
  misc_feature 1..80: note = Synthetic: >HKU15-cand-13690-13769
  source 1..80: mol_type = other DNA
ccgttgcaaaggctggagctgttgctgatcttgatggtttccgagacattttgttttaccaaaacaatgtttacatggca

SEQ ID NO: 13613 - DNA, 80 bp, synthetic construct
  misc_feature 1..80: note = Synthetic: >HKU15-cand-14100-14179
  source 1..80: mol_type = other DNA
actgacatgtcgtatgtaaataactttatgaatgaggccttttatgctcagatgtatgagcaaagtcctacactacaggc

SEQ ID NO: 13614 - DNA, 80 bp, synthetic construct
  misc_feature 1..80: note = Synthetic: >HKU15-cand-21900-21979
  source 1..80: mol_type = other DNA
aagttgaccgtctcatcacaggacggttggctgcacttaatgcatatgttactcagttactcaatcagatgtctcagatt

SEQ ID NO: 13615 - DNA, 80 bp, synthetic construct
  misc_feature 1..80: note = Synthetic: >HKU15-cand-21980-22059
  source 1..80: mol_type = other DNA
agacaatctcgattgttagctcagcaaaagattaatgagtgtgtcaaatctcagtcgtccagatacggtttctgtggaaa

SEQ ID NO: 13616 - DNA, 80 bp, synthetic construct
  misc_feature 1..80: note = Synthetic: >HKU15-cand-22060-22139
  source 1..80: mol_type = other DNA
tggcacacacatcttctcacttacacagactgcaccaaatggcatatttttcatgcatgcagtgctagtacccaacaaat

SEQ ID NO: 13617 - DNA, 80 bp, synthetic construct
  misc_feature 1..80: note = Synthetic: >HKU15-cand-22140-22219
  source 1..80: mol_type = other DNA
tcacacgtgtcaacgcttctgccggcatttgtgtggataatacgagaggctactcattgcagcctcaacttatactctac

SEQ ID NO: 13618 - DNA, 80 bp, synthetic construct
  misc_feature 1..80: note = Synthetic: >HKU15-cand-22220-22299
  source 1..80: mol_type = other DNA
cagtttaataactcctggagagttacacctagaaatatgtatgaacccagactgccccggcaggctgatttcatacaatt

SEQ ID NO: 13619 - DNA, 80 bp, synthetic construct
  misc_feature 1..80: note = Synthetic: >HKU15-cand-22300-22379
  source 1..80: mol_type = other DNA
aactgattgcagcgttactttttacaacaccaccgctgctaatcttcccaatattatccctgacattatagatgtcaatc

SEQ ID NO: 13620 - DNA, 80 bp, synthetic construct
  misc_feature 1..80: note = Synthetic: >HKU15-cand-22380-22459
  source 1..80: mol_type = other DNA
aaacagtcagtgatattattgacaatttacctacagcaacacctcctcagtgggatgttggtatctataacaacactatt

SEQ ID NO: 13621 - DNA, 80 bp, synthetic construct
  misc_feature 1..80: note = Synthetic: >HKU15-cand-22460-22539
  source 1..80: mol_type = other DNA
ctcaacctcaccgttgagattaatgatctacaagagcggtctaaaaacctctcacagattgcagatcgtttacaaaatta

SEQ ID NO: 13622 - DNA, 80 bp, synthetic construct
  misc_feature 1..80: note = Synthetic: >HKU15-cand-22540-22619
  source 1..80: mol_type = other DNA
tattgacaatcttaacaatactctagttgaccttgaatggctcaacagagtggaaacttaccttaaatggccgtggtata

SEQ ID NO: 13623 - DNA, 80 bp, synthetic construct
  misc_feature 1..80: note = Synthetic: >HKU15-cand-22620-22699
  source 1..80: mol_type = other DNA
tatggcttgccattgccctggctcttattgcatttgtgacaatcctcataacaatctttctttgtactggttgttgtggt

SEQ ID NO: 13624 - DNA, 80 bp, synthetic construct
  misc_feature 1..80: note = Synthetic: >HKU15-cand-22700-22779
  source 1..80: mol_type = other DNA
ggttgctttggttgttgtggcggttgttttggccttttctctaagaagaaaaggtataccgacgaccaaccaacaccgtc

SEQ ID NO: 13625 - DNA, 80 bp, synthetic construct
  misc_feature 1..80: note = Synthetic: >HKU15-cand-22780-22859
  source 1..80: mol_type = other DNA
ctttaagtttaaggaatggtagtcgacgactgggccgttaccatccctggacaatatattattgctatactagttgtcat

SEQ ID NO: 13626 - DNA, 80 bp, synthetic construct
  misc_feature 1..80: note = Synthetic: >HKU15-cand-22860-22939
  source 1..80: mol_type = other DNA
ctgcattggtgtggcactactttttattaacacttgcttagcttgtgttaaattattttacaagtgctacctaggggcag

SEQ ID NO: 13627 - DNA, 80 bp, synthetic construct
  misc_feature 1..80: note = Synthetic: >HKU15-cand-22940-23019
  source 1..80: mol_type = other DNA
catatcttgttaggcctattatagtgtactactccaagccgaaccccgtacctgaggatgagtttgtaaaagtacaccaa

SEQ ID NO: 13628 - DNA, 80 bp, synthetic construct
  misc_feature 1..80: note = Synthetic: >HKU15-cand-23020-23099
  source 1..80: mol_type = other DNA
tttcctagaaacactcactatgtctgacgcagaagagtggcaaattattgttttcattgcgatcatatgggcgcttggcg

SEQ ID NO: 13629 - DNA, 80 bp, synthetic construct
  misc_feature 1..80: note = Synthetic: >HKU15-cand-23100-23179
  source 1..80: mol_type = other DNA
tcatcctccaaggaggctatgccacgcgtaatcgtgtgatctatgttattaaacttattctgctttggctgctccaaccc

SEQ ID NO: 13630 - DNA, 80 bp, synthetic construct
  misc_feature 1..80: note = Synthetic: >HKU2-cand-320-399
  source 1..80: mol_type = other DNA
cttgcagttgcaagtgatcaggaaatttcagctcatggctatcctactatgtctgatgccgttgaacattttagttcctc

SEQ ID NO: 13631 - DNA, 80 bp, synthetic construct
  misc_feature 1..80: note = Synthetic: >HKU2-cand-400-479
  source 1..80: mol_type = other DNA
cgcatcacacggttttaaggattgccgttttgtagcctttgggctgcaggacattgttattggagttgaacccagtgact

SEQ ID NO: 13632 - DNA, 80 bp, synthetic construct
  misc_feature 1..80: note = Synthetic: >HKU2-cand-480-559
  source 1..80: mol_type = other DNA
ttgtcgtggctttggagggtgacgaaattctcactgcctatatagccacttttggagctagacctcgctgtttgcgcggt

SEQ ID NO: 13633 - DNA, 80 bp, synthetic construct
  misc_feature 1..80: note = Synthetic: >HKU2-cand-560-639
  source 1..80: mol_type = other DNA
tggcttataccctctaattctaattatgttttggaggaattccaagtgatttttggcaagcgcggcggtaacgttgtgtc

SEQ ID NO: 13634 - DNA, 80 bp, synthetic construct
  misc_feature 1..80: note = Synthetic: >HKU2-cand-640-719
  source 1..80: mol_type = other DNA
tgtcgataattacatgtgcggtgctgatggtaaaccggcagttcctagcgaacagtggtcttttgttgagcactttgacg

SEQ ID NO: 13635 - DNA, 80 bp, synthetic construct
  misc_feature 1..80: note = Synthetic: >HKU2-cand-720-799
  source 1..80: mol_type = other DNA
atgatacagatgagatcaccgttaatggtgtcacttttcgccacgtatggaataccgttcgcgctgacgacccttatgaa

SEQ ID NO: 13636 - DNA, 80 bp, synthetic construct
  misc_feature 1..80: note = Synthetic: >HKU2-cand-800-879
  source 1..80: mol_type = other DNA
aaacagggtcttctttctattaagtctatagagtacatctccaatgttcctcacaagttgcctaatggttctgtccttgg

SEQ ID NO: 13637 - DNA, 80 bp, synthetic construct
  misc_feature 1..80: note = Synthetic: >HKU2-cand-880-959
  source 1..80: mol_type = other DNA
tgttgccggaactcctaagaagcgtaaggctattgtgcttgatgaaaagtatagtaagctttatgatgcttgtggtgttc

SEQ ID NO: 13638 - DNA, 80 bp, synthetic construct
  misc_feature 1..80: note = Synthetic: >HKU2-cand-960-1039
  source 1..80: mol_type = other DNA
cttttgtcactaatggcaaatctatttcagaagttgtccctaaaccactctttttgcatgctcttgttaagtgcaagtgc

SEQ ID NO: 13639 - DNA, 80 bp, synthetic construct
  misc_feature 1..80: note = Synthetic: >HKU2-cand-1040-1119
  source 1..80: mol_type = other DNA
gataatgagtcttggactgttggtgactggactggttttaagactacttgttgtggttccactggtaaagttacgacttt

SEQ ID NO: 13640 - DNA, 80 bp, synthetic construct
  misc_feature 1..80: note = Synthetic: >HKU2-cand-1150-1229
  source 1..80: mol_type = other DNA
tgtctttaccacacttggtgcaggtaaaggcactaagttcttttgtggtcttgttctcacctttgttgacacacttgagg

SEQ ID NO: 13641 - DNA, 80 bp, synthetic construct
  misc_feature 1..80: note = Synthetic: >HKU2-cand-1230-1309
  source 1..80: mol_type = other DNA
gtgtttccgcatggcgtgttgttaaggcctatacagttgataagtttgttgcatcttctaactttgatgaacacaaccat

SEQ ID NO: 13642 - DNA, 80 bp, synthetic construct
  misc_feature 1..80: note = Synthetic: >HKU2-cand-1310-1389
  source 1..80: mol_type = other DNA
gttatgagcttggatcaatgctcatttgacaactttagtcctattagcgtagcactgaagttctcacttttgcgtggtaa

SEQ ID NO: 13643 - DNA, 80 bp, synthetic construct
  misc_feature 1..80: note = Synthetic: >HKU2-cand-1390-1469
  source 1..80: mol_type = other DNA
ttgctgtgacgacgtcaagtttgctgttgcaactggtgtgattgacattggtcttggtgtctttgatgttaatgatactg

SEQ ID NO: 13644 - DNA, 80 bp, synthetic construct
  misc_feature 1..80: note = Synthetic: >HKU2-cand-1470-1549
  source 1..80: mol_type = other DNA
tttttgagaatgtaccatggtttgttcagaagtttgagtttttgaaaccagcatgggatgctctaaagcaggccattatc

SEQ ID NO: 13645 - DNA, 80 bp, synthetic construct
  misc_feature 1..80: note = Synthetic: >HKU2-cand-1550-1629
  source 1..80: mol_type = other DNA
aaccttggtgtaacatctaaggctgttttgtcttttattaagtcactgtgtagtgctgcattcagtgttgttgacggcgt

SEQ ID NO: 13646 - DNA, 80 bp, synthetic construct
  misc_feature 1..80: note = Synthetic: >HKU2-cand-6740-6819
  source 1..80: mol_type = other DNA
cttaagaggattgccatggataccattgttaatggttctaggcgatctttttatgttaatgctaatggtggtgctaagtt

SEQ ID NO: 13647 - DNA, 80 bp, synthetic construct
  misc_feature 1..80: note = Synthetic: >HKU2-cand-6820-6899
  source 1..80: mol_type = other DNA
atgtaaaaagcataactttttctgtgtcgcttgtgattcttatggtagtggtcatacttatattaatgatcatattgcca

SEQ ID NO: 13648 - DNA, 80 bp, synthetic construct
  misc_feature 1..80: note = Synthetic: >HKU2-cand-6900-6979
  source 1..80: mol_type = other DNA
atgagttacataatgttactaagttacatgttaagcctactggtcctgcttttattaatattgatagggttgagtttagt

SEQ ID NO: 13649 - DNA, 80 bp, synthetic construct
  misc_feature 1..80: note = Synthetic: >HKU2-cand-6980-7059
  source 1..80: mol_type = other DNA
gatggattttaccgcatcttttctggtgacaaattttggaaatataattttgatattactgataaaaagttttcttgtaa

SEQ ID NO: 13650 - DNA, 80 bp, synthetic construct
  misc_feature 1..80: note = Synthetic: >HKU2-cand-7060-7139
  source 1..80: mol_type = other DNA
agaagtacttaagaattgtaatatcttagatgattttattgtctttgacaataatggttcaaacttgtctcaggttcaga

SEQ ID NO: 13651 - DNA, 80 bp, synthetic construct
  misc_feature 1..80: note = Synthetic: >HKU2-cand-7140-7219
  source 1..80: mol_type = other DNA
atgcgtgtgtttatctctcacaacttctgtgtaagcctattaagattattgattctacactactgtcttcacttaatgtt

SEQ ID NO: 13652 - DNA, 80 bp, synthetic construct
  misc_feature 1..80: note = Synthetic: >HKU2-cand-7540-7619
  source 1..80: mol_type = other DNA
gaattgcgtggattttgccaagctttcagttgatgctagaaaatacattgttaaaactgctaaggttaaaggtgtaactt

SEQ ID NO: 13653 - DNA, 80 bp, synthetic construct
  misc_feature 1..80: note = Synthetic: >HKU2-cand-7620-7699
  source 1..80: mol_type = other DNA
ttctccttactgttaataacaatgttatggaaactaccttaccttgtgttagtgtgttgcaaaaacagggtgctggtaag

SEQ ID NO: 13654 - DNA, 80 bp, synthetic construct
  misc_feature 1..80: note = Synthetic: >HKU2-cand-7780-7859
  source 1..80: mol_type = other DNA
tacggagtacgcatctagcttacccggttacgactttaagtatattgaggatggtcaacttaagccatttgctaatggtt

SEQ ID NO: 13655 - DNA, 80 bp, synthetic construct
  misc_feature 1..80: note = Synthetic: >HKU2-cand-7860-7939
  source 1..80: mol_type = other DNA
tgtattgcgttcgcaacacgtttgacacatttatggactggcatgctcagaaatttggctttaaaccatcaaatagtgac

SEQ ID NO: 13656 - DNA, 80 bp, synthetic construct
  misc_feature 1..80: note = Synthetic: >HKU2-cand-7940-8019
  source 1..80: mol_type = other DNA
aagtgtcctatagttgttggtgctagtgattctggacgtgttgtacctggtgttgcatctgatgtttatttgcttggtaa

SEQ ID NO: 13657 - DNA, 80 bp, synthetic construct
  misc_feature 1..80: note = Synthetic: >HKU31-cand-22020-22099
  source 1..80: mol_type = other DNA
gttctgctgctaataaaactggtagtcctattatttctaatattaatagtaactttcagattatgaagaaactttatcca

SEQ ID NO: 13658 - DNA, 80 bp, synthetic construct
  misc_feature 1..80: note = Synthetic: >HKU31-cand-22100-22179
  source 1..80: mol_type = other DNA
gctctgatctttggtagtgctgtcggtaaatttcctgctaataataaaacaggagcttattttaatcatagcctcgttat

SEQ ID NO: 13659 - DNA, 80 bp, synthetic construct
  misc_feature 1..80: note = Synthetic: >HKU31-cand-22180-22259
  source 1..80: mol_type = other DNA
tttgcccgaaaaatgtggcacggtaattacagcactttattgtgttttacagcccaagaatgagaccaattgtactggta

SEQ ID NO: 13660 - DNA, 80 bp, synthetic construct
  misc_feature 1..80: note = Synthetic: >HKU31-cand-22260-22339
  source 1..80: mol_type = other DNA
gttctggttatgttagttatgtgctgtttgaaaattatagttgcgatgcaactactgatggtaatttaaaaaaaagttta

SEQ ID NO: 13661 - DNA, 80 bp, synthetic construct
  misc_feature 1..80: note = Synthetic: >HKU31-cand-22340-22419
  source 1..80: mol_type = other DNA
cagcagtggtttaatattaaagattgtctttttgagaaaaagtacaatgttactgatgatgagagggaagaatggtttgg

SEQ ID NO: 13662 - DNA, 80 bp, synthetic construct
  misc_feature 1..80: note = Synthetic: >HKU31-cand-22420-22499
  source 1..80: mol_type = other DNA
aataacccaagatcagcaaggtgtccacctctatacatctcgtaagaatgggtttaattcaaacaatatgtttttgtttg

SEQ ID NO: 13663 - DNA, 80 bp, synthetic construct
  misc_feature 1..80: note = Synthetic: >HKU31-cand-22500-22579
  source 1..80: mol_type = other DNA
ctactttaccaatttatgataagatactatattatactgttatgccgcgcagtattaaagctactaagaatacagaatat

SEQ ID NO: 13664 - DNA, 80 bp, synthetic construct
  misc_feature 1..80: note = Synthetic: >HKU31-cand-22580-22659
  source 1..80: mol_type = other DNA
catgctttttcagcattttatatttataagttacacaaaatcaactatatggttgactttgatgtaaatggttatatcac

SEQ ID NO: 13665 - DNA, 80 bp, synthetic construct
  misc_feature 1..80: note = Synthetic: >HKU31-cand-22660-22739
  source 1..80: mol_type = other DNA
aagggctgtcgattgtggttataatgattatacacaattgcaatgctcttatggtcaatttgatatggattctggtgttt

SEQ ID NO: 13666 - DNA, 80 bp, synthetic construct
  misc_feature 1..80: note = Synthetic: >HKU31-cand-22740-22819
  source 1..80: mol_type = other DNA
attcagcttcatattttaatgctcgctctagaggttattattatgaagctgcagaactcacagaatgtgacttagatgta

SEQ ID NO: 13667 - DNA, 80 bp, synthetic construct
  misc_feature 1..80: note = Synthetic: >HKU31-cand-22820-22899
  source 1..80: mol_type = other DNA
ttgtttaaaaacgatgctcctataatagctaattacagtaggcgtgttttcaccaattgtaattataatttaacaaagct

SEQ ID NO: 13668 - DNA, 80 bp, synthetic construct
  misc_feature 1..80: note = Synthetic: >HKU31-cand-22900-22979
  source 1..80: mol_type = other DNA
cctttctcttgtacaagtagatgagtttgtttgtcataaaacaacaccagaaagtcttgctactggttgttattcctctt

SEQ ID NO: 13669 - DNA, 80 bp, synthetic construct
  misc_feature 1..80: note = Synthetic: >HKU31-cand-22980-23059
  source 1..80: mol_type = other DNA
taacggtagactggtttgctctaccttttagtatgaaatcaacattagctataggatcagcagaggctatatctatgttt

SEQ ID NO: 13670 - DNA, 80 bp, synthetic construct
  misc_feature 1..80: note = Synthetic: >HKU31-cand-23060-23139
  source 1..80: mol_type = other DNA
aattataatcaggattattccaatcctacgtgtagaattcatgcagctgtaaccgctaatgtttcaacagctttgaattt

SEQ ID NO: 13671 - DNA, 80 bp, synthetic construct
  misc_feature 1..80: note = Synthetic: >HKU31-cand-23140-23219
  source 1..80: mol_type = other DNA
tactgctaatgctaattatgcttatatttccagatgtcaaggaactgatggtaaacctattttattacagccaggacaaa

SEQ ID NO: 13672 - DNA, 80 bp, synthetic construct
  misc_feature 1..80: note = Synthetic: >HKU31-cand-23220-23299
  source 1..80: mol_type = other DNA
tgactaatattgcttgtcgctcaggagttttggcacggccatcagatgcagattattttggttattcatttcaaggacgc

SEQ ID NO: 13673 - DNA, 80 bp, synthetic construct
  misc_feature 1..80: note = Synthetic: >HKU31-cand-29690-29769
  source 1..80: mol_type = other DNA
tcccaactattctaagtggctggagattcttgaagaaaatatagatgcttacaaaaacttccctaagaaggaaaagaagc

SEQ ID NO: 13674 - DNA, 80 bp, synthetic construct
  misc_feature 1..80: note = Synthetic: >HKU31-cand-29770-29849
  source 1..80: mol_type = other DNA
agaaacaatctcagattaaacaagaaccggaagaccctgagtgggactccacagatttgttttctcaacctttacaagac

SEQ ID NO: 13675 - DNA, 80 bp, synthetic construct
  misc_feature 1..80: note = Synthetic: >HKU31-cand-29850-29929
  source 1..80: mol_type = other DNA
ccagacaaccagccgaaggcacagcgtgttccaaaaggtagtattacccagaggtcacgccctcctaagcctacagttgg

SEQ ID NO: 13676 - DNA, 80 bp, synthetic construct
  misc_feature 1..80: note = Synthetic: >HKU31-cand-29930-30009
  source 1..80: mol_type = other DNA
tccaatggtcgatgtagaaccttaaaaaggtacagtaaaagtaacaagagtaaggcaatcgctagtgaatggaaacccca

SEQ ID NO: 13677 - DNA, 80 bp, synthetic construct
  misc_feature 1..80: note = Synthetic: >HKU31-cand-30010-30089
  source 1..80: mol_type = other DNA
tgtcatgacgcaattgtctactcttgcacagaatggaatcatgttgtaactacagtgcaagaaggtaggtacaatccatt

SEQ ID NO: 13678 - DNA, 80 bp, synthetic construct
  misc_feature 1..80: note = Synthetic: >HKU31-cand-30090-30169
  source 1..80: mol_type = other DNA
taattgatagctatgttttagtaaagtgtgtagctatagagagtaagttaaaggttaacaccgctgcataattggccctt

SEQ ID NO: 13679 - DNA, 80 bp, synthetic construct
  misc_feature 1..80: note = Synthetic: >HKU31-cand-30170-30249
  source 1..80: mol_type = other DNA
gcatgtgattaacgccccctgggaagagctctatagtgtgtaatgtaaataagaatagctataattcaattaattaggct

SEQ ID NO: 13680 - DNA, 80 bp, synthetic construct
  misc_feature 1..80: note = Synthetic: >HKU4-cand-10-89
  source 1..80: mol_type = other DNA
gcctagctatctcaccccctctcgttctcttgcagaactttgattttaacgaacttaaataatagccttgctgtgtgcgt

SEQ ID NO: 13681 - DNA, 80 bp, synthetic construct
  misc_feature 1..80: note = Synthetic: >HKU4-cand-90-169
  source 1..80: mol_type = other DNA
gttgtgttgtggtctgcagcgtttaggcgccgggcttcaagcttcatgctccacactgggcataattaaatatactaaat

SEQ ID NO: 13682 - DNA, 80 bp, synthetic construct
  misc_feature 1..80: note = Synthetic: >HKU4-cand-170-249
  source 1..80: mol_type = other DNA
aataatatttttcattctgagctatcgtgtctcttgtacttctcggtcacaataccctgttccgtcaggtgcgtggcaat

SEQ ID NO: 13683 - DNA, 80 bp, synthetic construct
  misc_feature 1..80: note = Synthetic: >HKU4-cand-370-449
  source 1..80: mol_type = other DNA
gatactgatgacatggcttgtaagctcacaccatggtttgaagatggggaaactgccttcaaccaagtgagttctattct

SEQ ID NO: 13684 - DNA, 80 bp, synthetic construct
  misc_feature 1..80: note = Synthetic: >HKU4-cand-530-609
  source 1..80: mol_type = other DNA
tggttgagagacttactggaggtatgctttcaaagcacttccttgttaaccaattggcttacaaagatcatgttggtgcc

SEQ ID NO: 13685 - DNA, 80 bp, synthetic construct
  misc_feature 1..80: note = Synthetic: >HKU4-cand-690-769
  source 1..80: mol_type = other DNA
cacttttctcctacgtaagaatggtcttggaggacaactcttccgtgaacgaccatgggatcgtaaggaaacaccttacg

SEQ ID NO: 13686 - DNA, 80 bp, synthetic construct
  misc_feature 1..80: note = Synthetic: >HKU4-cand-7170-7249
  source 1..80: mol_type = other DNA
ctgttctaaccgctcagttttatgtcaatggtgtcttattggtcaagactcattgacacgttattcagctcttcaaatgc

SEQ ID NO: 13687 - DNA, 80 bp, synthetic construct
  misc_feature 1..80: note = Synthetic: >HKU4-cand-7250-7329
  source 1..80: mol_type = other DNA
ttcaaacccatataaccagctatgttttgaacatagattggatttggtttgcacttgagttctttttagcatatgtgttg

SEQ ID NO: 13688 - DNA, 80 bp, synthetic construct
  misc_feature 1..80: note = Synthetic: >HKU4-cand-7330-7409
  source 1..80: mol_type = other DNA
tatacgtctagctttaacgtattattgttagttgttacagcacaatatttctttgcttacactagtgcatttgtaaattg

SEQ ID NO: 13689 - DNA, 80 bp, synthetic construct
  misc_feature 1..80: note = Synthetic: >HKU4-cand-7410-7489
  source 1..80: mol_type = other DNA
gcgtgcttacaattacatagtgtcaggtctctttttcttagtaacacacataccgttacatggtttagtgcgtgtttata

SEQ ID NO: 13690 - DNA, 80 bp, synthetic construct
  misc_feature 1..80: note = Synthetic: >HKU4-cand-7490-7569
  source 1..80: mol_type = other DNA
attttcttgcatgtttgtggtttctgaggaaattttatagccatgttattaatggttgtaaagacacagcatgtctttta

SEQ ID NO: 13691 - DNA, 80 bp, synthetic construct
  misc_feature 1..80: note = Synthetic: >HKU4-cand-7570-7649
  source 1..80: mol_type = other DNA
tgttataaaaggaatcgtcttacacgtgttgaagcttccaccattgtctgtggtactaaacgtacgttttatatcgcagc

SEQ ID NO: 13692 - DNA, 80 bp, synthetic construct
  misc_feature 1..80: note = Synthetic: >HKU4-cand-7650-7729
  source 1..80: mol_type = other DNA
taatggaggcacgtcttactgttgtaaacataattggaattgtgttgaatgcgacactgcaggtgtagggaataccttta

SEQ ID NO: 13693 - DNA, 80 bp, synthetic construct
  misc_feature 1..80: note = Synthetic: >HKU4-cand-7730-7809
  source 1..80: mol_type = other DNA
tctgtacagaagtcgctaatgacctcactaccactttacgcagacttattaaacccactgatcagtcacattattatgtg

SEQ ID NO: 13694 - DNA, 80 bp, synthetic construct
  misc_feature 1..80: note = Synthetic: >HKU4-cand-7810-7889
  source 1..80: mol_type = other DNA
gattcagttgtggttaaagatgcagttgttgaactacattacaatagagatggttcttcatgttatgagcgttaccctct

SEQ ID NO: 13695 - DNA, 80 bp, synthetic construct
  misc_feature 1..80: note = Synthetic: >HKU4-cand-7890-7969
  source 1..80: mol_type = other DNA
ctgttattttactaatttagaaaaattgaagttcaaagaggtttgtaaaactcctacaggtatacctgaacacaattttc

SEQ ID NO: 13696 - DNA, 80 bp, synthetic construct
  misc_feature 1..80: note = Synthetic: >HKU4-cand-7970-8049
  source 1..80: mol_type = other DNA
taatttatgacactaatgatcgtggccaggaaaatttagctaggtcagcttgtgtttattattcccaagtcttatgcaag

SEQ ID NO: 13697 - DNA, 80 bp, synthetic construct
  misc_feature 1..80: note = Synthetic: >HKU4-cand-8050-8129
  source 1..80: mol_type = other DNA
cctatgctgcttgttgatgttaatttggttaccactgttggtgatagtagagaaatcgccatcaaaatgttggattcctt

SEQ ID NO: 13698 - DNA, 80 bp, synthetic construct
  misc_feature 1..80: note = Synthetic: >HKU4-cand-8130-8209
  source 1..80: mol_type = other DNA
tataaatagtttcatctctctctttagtgtaagtcgtgataagcttgagaagcttattaacactgcacgtgattgtgtta

SEQ ID NO: 13699 - DNA, 80 bp, synthetic construct
  misc_feature 1..80: note = Synthetic: >HKU4-cand-8210-8289
  source 1..80: mol_type = other DNA
gaagaggagatgatttccaaaatgttttaaagacttttactgatgctgcccgtggacatgctggtgtggagtctgatgtt

SEQ ID NO: 13700 - DNA, 80 bp, synthetic construct
  misc_feature 1..80: note = Synthetic: >HKU4-cand-8290-8369
  source 1..80: mol_type = other DNA
gagacaactatggttgttgatgcattacagtatgcacataagaatgatattcagttgacaactgaatgttataataatta

SEQ ID NO: 13701 - DNA, 80 bp, synthetic construct
  misc_feature 1..80: note = Synthetic: >HKU4-cand-8370-8449
  source 1..80: mol_type = other DNA
tgtgcctggttatattaaaccagatagcataaatacattagatttaggttgtttgattgaccttaaagctgcttctgtta

SEQ ID NO: 13702 - DNA, 80 bp, synthetic construct
  misc_feature 1..80: note = Synthetic: >Lucheng19-cand-5120-5199
  source 1..80: mol_type = other DNA
ccgcacgtactaacacagagtctgatgattctaatgaagaaattgtcactgtgcttgtaacagaagacactgttaattat

SEQ ID NO: 13703 - DNA, 80 bp, synthetic construct
  misc_feature 1..80: note = Synthetic: >Lucheng19-cand-5200-5279
  source 1..80: mol_type = other DNA
actacaaccactgtttctaccaatgccacttttggtgaacagctcggcatttgcgctatggctaacaaagacgttacaaa

SEQ ID NO: 13704 - DNA, 80 bp, synthetic construct
  misc_feature 1..80: note = Synthetic: >Lucheng19-cand-5280-5359
  source 1..80: mol_type = other DNA
acaaaaacccacattggaaaatgagggttgtgcagtcgtactcccacctgcgatagattatgaaagttactacggttttg

SEQ ID NO: 13705 - DNA, 80 bp, synthetic construct
  misc_feature 1..80: note = Synthetic: >Lucheng19-cand-5360-5439
  source 1..80: mol_type = other DNA
atgccgccagcttcagtgctgtcagtcataatgactacaattttgagagtgtaattgatgatggcatagtggctctaact

SEQ ID NO: 13706 - DNA, 80 bp, synthetic construct
  misc_feature 1..80: note = Synthetic: >Lucheng19-cand-5440-5519
  source 1..80: mol_type = other DNA
caagatcgtaataactgttggcttaacgctgtttgtctatctttacaaatgctaaaaccacagtttaagtttgaaggcat

SEQ ID NO: 13707 - DNA, 80 bp, synthetic construct
  misc_feature 1..80: note = Synthetic: >Lucheng19-cand-5520-5599
  source 1..80: mol_type = other DNA
taaaaagttgtgggatgaattttgcactggtgatgtggcaggtttttgtcactttgtctattttacgtccaacataagcc

SEQ ID NO: 13708 - DNA, 80 bp, synthetic construct
  misc_feature 1..80: note = Synthetic: >Lucheng19-cand-5600-5679
  source 1..80: mol_type = other DNA
tgggctcgaaagcagacgcggaagttgttttacacaaattgaacaactttatagaatccgacaatactgttacacatatg

SEQ ID NO: 13709 - DNA, 80 bp, synthetic construct
  misc_feature 1..80: note = Synthetic: >Lucheng19-cand-5680-5759
  source 1..80: mol_type = other DNA
acgtgcacacagtgtgtggactgtaaagaagacactggtactactaaaggcgctgtcataaattctagtctttcaagaag

SEQ ID NO: 13710 - DNA, 80 bp, synthetic construct
  misc_feature 1..80: note = Synthetic: >Lucheng19-cand-5760-5839
  source 1..80: mol_type = other DNA
taatgttacgaccggtaagtgcaaacacggctattgtaagaatgtcatcgtcaagagaataaccggcgactgcatactta

SEQ ID NO: 13711 - DNA, 80 bp, synthetic construct
  misc_feature 1..80: note = Synthetic: >Lucheng19-cand-5840-5919
  source 1..80: mol_type = other DNA
ctagtaaaaaaccctgtgctgcagaccagtacattaccaacgttggcaggattctttacaacggtgatgagactaatggt

SEQ ID NO: 13712 - DNA, 80 bp, synthetic construct
  misc_feature 1..80: note = Synthetic: >Lucheng19-cand-5920-5999
  source 1..80: mol_type = other DNA
cattacacgttctatgactgcacccgtggaagactgtatgatggttcaacctataaactacaagatgttgccagtgttaa

SEQ ID NO: 13713 - DNA, 80 bp, synthetic construct
  misc_feature 1..80: note = Synthetic: >Lucheng19-cand-6000-6079
  source 1..80: mol_type = other DNA
agctcctgtatcatcacttgttgtgaagaagcaagcggtggttcagaaacgacctccaattccggacgcaccagttacaa

SEQ ID NO: 13714 - DNA, 80 bp, synthetic construct
  misc_feature 1..80: note = Synthetic: >Lucheng19-cand-6080-6159
  source 1..80: mol_type = other DNA
aacctaaaacagttaagcctcccatacatggtcagattgactatgctaagaaatttgaagattttagtgtaagattcttc

SEQ ID NO: 13715 - DNA, 80 bp, synthetic construct
  misc_feature 1..80: note = Synthetic: >Lucheng19-cand-6160-6239
  source 1..80: mol_type = other DNA
agggtgggagactacatttttagtaatataacaattctctttctcatgatgctggacatgttaaaaaaatgctaaacatc

SEQ ID NO: 13716 - DNA, 80 bp, synthetic construct
  misc_feature 1..80: note = Synthetic: >Lucheng19-cand-6240-6319
  source 1..80: mol_type = other DNA
gcttaaaaaaaaagacataaaaattctagcacgcatacctaaaagatcaggtatagtcgttacaaagagtctactctaca

SEQ ID NO: 13717 - DNA, 80 bp, synthetic construct
  misc_feature 1..80: note = Synthetic: >Lucheng19-cand-6320-6399
  source 1..80: mol_type = other DNA
acagcaaagttgcagcaaatagcatctatgaaaaacgcaaatggttttacacatttggcatagtagccagcgcattctat

SEQ ID NO: 13718 - DNA, 80 bp, synthetic construct
  misc_feature 1..80: note = Synthetic: >Lucheng19-cand-8960-9039
  source 1..80: mol_type = other DNA
catggtatgttattgtgggctatgtaataatactcctatgtgattgcatgccatctattaccaagcttaagttgtccacc

SEQ ID NO: 13719 - DNA, 80 bp, synthetic construct
  misc_feature 1..80: note = Synthetic: >Lucheng19-cand-9040-9119
  source 1..80: mol_type = other DNA
aatttattggaaggcgacaagtttgtgggtagttttgaacatgcctcaaggggtacttttgtccttaatgctcacagttg

SEQ ID NO: 13720 - DNA, 80 bp, synthetic construct
  misc_feature 1..80: note = Synthetic: >Lucheng19-cand-9120-9199
  source 1..80: mol_type = other DNA
cgcgaaacttgttaatgaaattggccaggaaaaactcgataggtatgccgctaattatgcccgttataggcattatagtg

SEQ ID NO: 13721 - DNA, 80 bp, synthetic construct
  misc_feature 1..80: note = Synthetic: >Lucheng19-cand-9200-9279
  source 1..80: mol_type = other DNA
gcaaccctaatgaggccgattatagagcggcttgttttgcatggctggcaaaggcaattaaagactaccaaataagcccc

SEQ ID NO: 13722 - DNA, 80 bp, synthetic construct
  misc_feature 1..80: note = Synthetic: >Lucheng19-cand-9280-9359
  source 1..80: mol_type = other DNA
caggacaaactatattgtgcacctacagtaagctataacagtgttttacaatctggctttaaaaagatagcacaaccatc

SEQ ID NO: 13723 - DNA, 80 bp, synthetic construct
  misc_feature 1..80: note = Synthetic: >Lucheng19-cand-9440-9519
  source 1..80: mol_type = other DNA
atgcaccaagacacgttatagcatcagacacaaccaaaattgtggattatgaaaccgaacaaaacttggtacgatctcac

SEQ ID NO: 13724 - DNA, 80 bp, synthetic construct
  misc_feature 1..80: note = Synthetic: >Lucheng19-cand-9520-9599
  source 1..80: mol_type = other DNA
aacttcagcatctcacgaggtaacagctatcttacagtcaaaggctttagattcgaaggttgcaacgtggttattaatgt

SEQ ID NO: 13725 - DNA, 80 bp, synthetic construct
  misc_feature 1..80: note = Synthetic: >Lucheng19-cand-9600-9679
  source 1..80: mol_type = other DNA
tgcagaagttaaccctcttacaccagagcataaatttgacactctgaaaccaggtgacaactttaacatcttagcatgct

SEQ ID NO: 13726 - DNA, 80 bp, synthetic construct
  misc_feature 1..80: note = Synthetic: >Lucheng19-cand-9680-9759
  source 1..80: mol_type = other DNA
atgatggcattcccagtggtgtctatggtgtaacacttagacacaatagcactattaaaggttccttcgttaatggtaca

SEQ ID NO: 13727 - DNA, 80 bp, synthetic construct
  misc_feature 1..80: note = Synthetic: >Lucheng19-cand-9760-9839
  source 1..80: mol_type = other DNA
tgtggatcaccaggttatgtaatttcaaatggtgtaattaagttttgctacttacaccagatggagcttggtagtggggc

SEQ ID NO: 13728 - DNA, 80 bp, synthetic construct
  misc_feature 1..80: note = Synthetic: >Lucheng19-cand-9840-9919
  source 1..80: mol_type = other DNA
gcatgtagggtctgattttaaaggcaagatgtatggtggttaccaagatcaagccaagattcagattgaaggagccaata

SEQ ID NO: 13729 - DNA, 80 bp, synthetic construct
  misc_feature 1..80: note = Synthetic: >Lucheng19-cand-9920-9999
  source 1..80: mol_type = other DNA
aactgattacagaaaatgttatagccttcttctatgcagcacttcttaatggtgagcgctggtggtgttctaagaacagc

SEQ ID NO: 13730 - DNA, 80 bp, synthetic construct
  misc_feature 1..80: note = Synthetic: >Lucheng19-cand-10000-10079
  source 1..80: mol_type = other DNA
acctgcattactaactttaacagttgggctgccgaaaacaactacaccaagctagccacaacagatgttttcaatctagt

SEQ ID NO: 13731 - DNA, 80 bp, synthetic construct
  misc_feature 1..80: note = Synthetic: >Lucheng19-cand-10160-10239
  source 1..80: mol_type = other DNA
tactaggctacgcctccattaatgatgaatacaccataacagaggtaatgcaacagatgtttggagtacagctacagagt

SEQ ID NO: 13732 - DNA, 80 bp, synthetic construct
  misc_feature 1..80: note = Synthetic: >PEDV-cand-16340-16419
  source 1..80: mol_type = other DNA
tgcttatagcaatgacaaatgttcacgcatcataccacagcgcgctcgtgttgagtgttatgatggtttcaagtctaata

SEQ ID NO: 13733 - DNA, 80 bp, synthetic construct
  misc_feature 1..80: note = Synthetic: >PEDV-cand-16420-16499
  source 1..80: mol_type = other DNA
atactagtgctcagtaccttttctctactgtcaatgctttgccagagtgcaatgcggacattgttgtggtggatgaggtc

SEQ ID NO: 13734 - DNA, 80 bp, synthetic construct
  misc_feature 1..80: note = Synthetic: >PEDV-cand-16500-16579
  source 1..80: mol_type = other DNA
tctatgtgcactaattatgacttgtctgtcataaatcagcgcatcagctataggcatgtagtctatgttggtgaccctca

SEQ ID NO: 13735 - DNA, 80 bp, synthetic construct
  misc_feature 1..80: note = Synthetic: >PEDV-cand-16580-16659
  source 1..80: mol_type = other DNA
acagctgcctgcaccacgtgttatgatttcacgtggtactttggaaccaaaggactacaacgttgtcactcaacgcatgt

SEQ ID NO: 13736 - DNA, 80 bp, synthetic construct
  misc_feature 1..80: note = Synthetic: >PEDV-cand-16660-16739
  source 1..80: mol_type = other DNA
gtgcccttaagcctgatgttttcttgcacaagtgttatcgctgtcctgctgagatagtgcgtactgtgtctgagatggtc

SEQ ID NO: 13737 - DNA, 80 bp, synthetic construct
  misc_feature 1..80: note = Synthetic: >PEDV-cand-16740-16819
  source 1..80: mol_type = other DNA
tatgaaaaccaattcattcctgtgcacccagatagcaagcagtgttttaaaatcttttgcaagggtaatgttcaggttga

SEQ ID NO: 13738 - DNA, 80 bp, synthetic construct
  misc_feature 1..80: note = Synthetic: >PEDV-cand-16820-16899
  source 1..80: mol_type = other DNA
taatggttcaagcattaatcgcaggcaattggatgttgtgcgtatgtttttggctaaaaatcctaggtggtcaaaggctg

SEQ ID NO: 13739 - DNA, 80 bp, synthetic construct
  misc_feature 1..80: note = Synthetic: >PEDV-cand-16900-16979
  source 1..80: mol_type = other DNA
tttttatttctccttataacagccagaattatgttgccagccgcatgctaggtctacaaattcagacagttgactcatcc

SEQ ID NO: 13740 - DNA, 80 bp, synthetic construct
  misc_feature 1..80: note = Synthetic: >PEDV-cand-16980-17059
  source 1..80: mol_type = other DNA
cagggtagtgagtatgactatgtcatttacacacaaacttcagatactgcccatgcctgtaatgttaacaggtttaatgt

SEQ ID NO: 13741 - DNA, 80 bp, synthetic construct
  misc_feature 1..80: note = Synthetic: >PEDV-cand-17060-17139
  source 1..80: mol_type = other DNA
tgccatcacaagggccaagaaaggcatattatgtataatgtgcgataggtccctttttgatgtgcttaaattctttgagc

SEQ ID NO: 13742 - DNA, 80 bp, synthetic construct
  misc_feature 1..80: note = Synthetic: >PEDV-cand-17140-17219
  source 1..80: mol_type = other DNA
ttaaattgtctgatttgcaggctaatgagggttgtggtctttttaaagactgtagcagaggtgatgatctgttgccacca

SEQ ID NO: 13743 - DNA, 80 bp, synthetic construct
  misc_feature 1..80: note = Synthetic: >PEDV-cand-17220-17299
  source 1..80: mol_type = other DNA
tctcacgctaacaccttcatgtctttagcggacaattttaagactgatcaagatcttgctgttcaaataggtgttaatgg

SEQ ID NO: 13744 - DNA, 80 bp, synthetic construct
  misc_feature 1..80: note = Synthetic: >PEDV-cand-17300-17379
  source 1..80: mol_type = other DNA
acccattaaatatgagcatgttatctcgtttatgggtttccgttttgatatcaacatacccaaccatcatactctctttt

SEQ ID NO: 13745 - DNA, 80 bp, synthetic construct
  misc_feature 1..80: note = Synthetic: >PEDV-cand-17380-17459
  source 1..80: mol_type = other DNA
gcacacgcgactttgccatgcgcaatgttagaggttggttaggctttgacgttgaaggagcacatgttgttggctctaac

SEQ ID NO: 13746 - DNA, 80 bp, synthetic construct
  misc_feature 1..80: note = Synthetic: >PEDV-cand-17460-17539
  source 1..80: mol_type = other DNA
gtcggtacaaatgtcccattgcaattagggttttctaacggtgttgattttgttgtcagacctgaaggttgcgttgtaac

SEQ ID NO: 13747 - DNA, 80 bp, synthetic construct
  misc_feature 1..80: note = Synthetic: >PEDV-cand-17540-17619
  source 1..80: mol_type = other DNA
agagtctggtgactacattaaacccgtcagagctcgtgctccaccaggggaacaattcgcacaccttttgcctttactta

SEQ ID NO: 13748 - DNA, 80 bp, synthetic construct
  misc_feature 1..80: note = Synthetic: >Sparrow-cand-15460-15539
  source 1..80: mol_type = other DNA
ataacgtagttacagatataatggtacatgcaggagcagatgttatgctcgacatgtgctatagatgcccacgtgaaatc

SEQ ID NO: 13749 - DNA, 80 bp, synthetic construct
  misc_feature 1..80: note = Synthetic: >Sparrow-cand-15540-15619
  source 1..80: mol_type = other DNA
gttgagacagtgtctaaacttgtctacgataataagctaaaagcggcgaaaccgaactcaagacagtgttacaagaccat

SEQ ID NO: 13750 - DNA, 80 bp, synthetic construct
  misc_feature 1..80: note = Synthetic: >Sparrow-cand-15620-15699
  source 1..80: mol_type = other DNA
tgttaattttggtcctggagacattgctcatgagggacaatctgcctacaacgaagcacagttacgtttcgcactcgcat

SEQ ID NO: 13751 - DNA, 80 bp, synthetic construct
  misc_feature 1..80: note = Synthetic: >Sparrow-cand-15780-15859
  source 1..80: mol_type = other DNA
ttctctactcagaccgttgactcttctcaaggttctgagtatgattatgttatcttttgcgtgaccactgattcagctca

SEQ ID NO: 13752 - DNA, 80 bp, synthetic construct
  misc_feature 1..80: note = Synthetic: >Sparrow-cand-15940-16019
  source 1..80: mol_type = other DNA
aactttataatagcttgcagtttgaatccattgattcacagcttcagtcgagtgatgagaaaaccctcacaccactgttt

SEQ ID NO: 13753 - DNA, 80 bp, synthetic construct
  misc_feature 1..80: note = Synthetic: >Sparrow-cand-16100-16179
  source 1..80: mol_type = other DNA
tgaggagccacttgctaaacttgtaggagttgccgatggcactcttatatcatacaaaaccctagtttctgcactcgggt

SEQ ID NO: 13754 - DNA, 80 bp, synthetic construct
  misc_feature 1..80: note = Synthetic: >Sparrow-cand-16180-16259
  source 1..80: mol_type = other DNA
ttcttccttcacttaaaattgatgcatatcacaatatgttcctaacacgtgacgcgtgtcgcgcctatgttcagagttgg

SEQ ID NO: 13755 - DNA, 80 bp, synthetic construct
  misc_feature 1..80: note = Synthetic: >Sparrow-cand-16340-16419
  source 1..80: mol_type = other DNA
cggcaagaacttttcagttgttccagagggaatttgggtaaacgagcacggatcttgcactgagcccgtccctgccaaaa

SEQ ID NO: 13756 - DNA, 80 bp, synthetic construct
  misc_feature 1..80: note = Synthetic: >Sparrow-cand-16420-16499
  source 1..80: mol_type = other DNA
tacctcctggagaacaatttcggcaccttaaaaaggatatgcgccaggcgcgtccttggaaggttgtacgacgtgagatt

SEQ ID NO: 13757 - DNA, 80 bp, synthetic construct
  misc_feature 1..80: note = Synthetic: >Sparrow-cand-16500-16579
  source 1..80: mol_type = other DNA
gctgctcacattgctgaagtagcacctcatacagattacatatgctttgtcacctgggctcaccagcttgagctagcgac

SEQ ID NO: 13758 - DNA, 80 bp, synthetic construct
  misc_feature 1..80: note = Synthetic: >HKU14-cand-25780-25859
  source 1..80: mol_type = other DNA
ttttatatgattctaatggtaatctctatggttttagagactacttaacaaatagaacttttatgattcgtagttgctat

SEQ ID NO: 13759 - DNA, 80 bp, synthetic construct
  misc_feature 1..80: note = Synthetic: >BtSk_AlphaCoV-cand-25270-25349
  source 1..80: mol_type = other DNA
gagaactgtcgagttgttagatggtaattacctctacattttctccagttgtcaagtcgttggtgttactaattcaggtt

SEQ ID NO: 13760 - DNA, 80 bp, synthetic construct
  misc_feature 1..80: note = Synthetic: >Sb512-cand-25330-25409
  source 1..80: mol_type = other DNA
ttgagaactgtcgagttgttagatggtaattacctctacattttctccagttgtcaagtcgttggtgttactaattcagg

SEQ ID NO: 13761 - DNA, 80 bp, synthetic construct
  misc_feature 1..80: note = Synthetic: >HKU4-cand-1170-1249
  source 1..80: mol_type = other DNA
cactaataataagaattttaatcttaaacagcgtttgctctatactttttatggaaaagatgctgttcaacaaccaggtt

SEQ ID NO: 13762 - DNA, 80 bp, synthetic construct
  misc_feature 1..80: note = Synthetic: >HKU4R-cand-1160-1239
  source 1..80: mol_type = other DNA
gccactaataataagaactttaatctaaaacagcgtttgctctatacgttttatggaaaagatgctgttcaacaaccagg

SEQ ID NO: 13763 - DNA, 80 bp, synthetic construct
  misc_feature 1..80: note = Synthetic: >HKU2R-cand-1640-1719
  source 1..80: mol_type = other DNA
ttaagggtgttaaagaagctggtcttaagactatgacttatacacagtgtctgcttggacctactaagcctgttaaggtt

SEQ ID NO: 13764 - DNA, 80 bp, synthetic construct
  misc_feature 1..80: note = Synthetic: >SEAC-cand-1810-1889
  source 1..80: mol_type = other DNA
ggtgttaaagaagctggtcttaagactatgacctacacacagtgtctacttggatctaccaagcctgttaaggttaagcg

SEQ ID NO: 13765 - DNA, 80 bp, synthetic construct
  misc_feature 1..80: note = Synthetic: >HKU4R-cand-11870-11949
  source 1..80: mol_type = other DNA
cgtaactcatgggaagctctaatacttaattttaaattgcttggtattggcggtacaccttgtattaaggttgcaacagt

SEQ ID NO: 13766 - DNA, 80 bp, synthetic construct
  misc_feature 1..80: note = Synthetic: >FelineAlpha1-cand-490-569
  source 1..80: mol_type = other DNA
ccgtcatgttgcaaggctttattgttaaggctggctgcaatggcgttcttgaggactttgaccttaaaattgcccgtact

SEQ ID NO: 13767 - DNA, 80 bp, synthetic construct
  misc_feature 1..80: note = Synthetic: >Sb512-cand-24690-24769
  source 1..80: mol_type = other DNA
gttgcggttgttgtggttcttgtttctcaggttgttgtcgtggaactaaacttcaacattacgaaccaatagaaaaggtt

SEQ ID NO: 13768 - DNA, 80 bp, synthetic construct
  misc_feature 1..80: note = Synthetic: >BtSk_AlphaCoV-cand-24630-24709
  source 1..80: mol_type = other DNA
tgtggttgttgtggttcatgttttgcaggttgttgtcgtggaactaaacttcaacattacgaaccaatagaaaaggttca

SEQ ID NO: 13769 - DNA, 80 bp, synthetic construct
  misc_feature 1..80: note = Synthetic: >HKU2R-cand-13700-13779
  source 1..80: mol_type = other DNA
tattactgcaagagaagttgttgtcactaatttggataagagtgctggttatcctcttaataggtttggtaaagctcgtt

SEQ ID NO: 13770 - DNA, 80 bp, synthetic construct
  misc_feature 1..80: note = Synthetic: >BtRf_AlphaCoV-cand-13660-13739
  source 1..80: mol_type = other DNA
gtggttgtatcactgctagagaagttgttgtcactaatttggataagagtgctggttatcctcttaataggtttggtaaa

SEQ ID NO: 13771 - DNA, 80 bp, synthetic construct
  misc_feature 1..80: note = Synthetic: >AcCoV_JC34-cand-13570-13649
  source 1..80: mol_type = other DNA
gggttcagacttgacattgcgtcatttcttctttgcacagaatggcgctgcagctattacagattttgattattatcgtt

SEQ ID NO: 13772 - DNA, 80 bp, synthetic construct
  misc_feature 1..80: note = Synthetic: >Sparrow-cand-350-429
  source 1..80: mol_type = other DNA
gataggataaaaccccctatcgggtcactcttaaggcgtttcctccacgggatagccactagtgactaggtgtaagtgat

SEQ ID NO: 13773 - DNA, 80 bp, synthetic construct
  misc_feature 1..80: note = Synthetic: >HKU24-cand-330-409
  source 1..80: mol_type = other DNA
ctccccagttaagcaggaagagggatcggtcaaagatcattttgataatcacgttaagatggattgtagcatcctatcta

SEQ ID NO: 13774 - DNA, 80 bp, synthetic construct
  misc_feature 1..80: note = Synthetic: >FelineAlpha1-cand-18800-18879
  source 1..80: mol_type = other DNA
gccattaaattacaatatggctttttgaatgatttacctgtaagtactgtagggaacaaacctgtcacatggtacatcta

SEQ ID NO: 13775 - DNA, 80 bp, synthetic construct
  misc_feature 1..80: note = Synthetic: >HKU5R-cand-15110-15189
  source 1..80: mol_type = other DNA
tacttcgagatatatgatggcggttgcctcaatgcatcggaagtaattgtcaacaatttggataagagtgctggccatcc

SEQ ID NO: 13776 - DNA, 80 bp, synthetic construct
  misc_feature 1..80: note = Synthetic: >HKU4-cand-6530-6609
  source 1..80: mol_type = other DNA
gggataataattggtctagtttatttaagttacatactgttgaatctggagacttacagattgtagcggctggtggatct

SEQ ID NO: 13777 - DNA, 80 bp, synthetic construct
  misc_feature 1..80: note = Synthetic: >HKU4R-cand-6520-6599
  source 1..80: mol_type = other DNA
tagggataataattggtctagtttatttaagttacatactgttgaatctggagacttacagattgtagcgaatggtggat

SEQ ID NO: 13778 - DNA, 80 bp, synthetic construct
  misc_feature 1..80: note = Synthetic: >MsbCoV1-cand-28200-28279
  source 1..80: mol_type = other DNA
agatccgcttagacgagcctatatggaagagctagaacatatgtgctacatgttatagttagtagttgtagatgggtgtg

SEQ ID NO: 13779 - DNA, 80 bp, synthetic construct
  misc_feature 1..80: note = Synthetic: >MbCoV1-cand-28200-28279
  source 1..80: mol_type = other DNA
taatcaaagatccgcttagacgagcctatatggaagagctagaacatatgtgctacatgctatagttagtagttgtagat

SEQ ID NO: 13780 - DNA, 80 bp, synthetic construct
  misc_feature 1..80: note = Synthetic: >SEAC-cand-25160-25239
  source 1..80: mol_type = other DNA
cctactcgatacctatgccagtggcaccaacaggtattactctgacgattttaagtggaacactctttttcgatggcatc

SEQ ID NO: 13781 - DNA, 80 bp, synthetic construct
  misc_feature 1..80: note = Synthetic: >HKU5R-cand-10630-10709
  source 1..80: mol_type = other DNA
gtgtcttagcctgttacaatggcagaccaaccggagtcttcatggtaaatatgcgccagaacagcaccataaaaggatct

SEQ ID NO: 13782 - DNA, 80 bp, synthetic construct
  misc_feature 1..80: note = Synthetic: >HKU4R-cand-2280-2359
  source 1..80: mol_type = other DNA
tcatgcataagctatatgtctacactagttgtggctatgtagctgttgctgaacattcttctaaaattgtacaacaagtg

SEQ ID NO: 13783 - DNA, 80 bp, synthetic construct
  misc_feature 1..80: note = Synthetic: >SEAC-cand-22600-22679
  source 1..80: mol_type = other DNA
tcagtaccataatggtatacttgttataccacctattatggatgctgagacgttaggcatgtatggcgggattgctgctg

SEQ ID NO: 13784 - DNA, 80 bp, synthetic construct
  misc_feature 1..80: note = Synthetic: >Lucheng19-cand-14480-14559
  source 1..80: mol_type = other DNA
tccaaaatgtgaccgtgcactacctaacatgatacgcatggcttccgccatgattcttggttcaaagcatgttagctgct

SEQ ID NO: 13785 - DNA, 80 bp, synthetic construct
  misc_feature 1..80: note = Synthetic: >AcCoV_JC34-cand-14130-14209
  source 1..80: mol_type = other DNA
attatccaaaatgtgaccgtgcactacctaacatgatacgcatggcttctgccatgattcttggttcaaagcatgttagc

SEQ ID NO: 13786 - DNA, 80 bp, synthetic construct
  misc_feature 1..80: note = Synthetic: >HKU5R-cand-11430-11509
  source 1..80: mol_type = other DNA
tgcttaacatatgcaaatattgtctatgagcctcaaacaccagtttcaagtgcactgattgctgttgctaactggcttaa

SEQ ID NO: 13787 - DNA, 80 bp, synthetic construct
  misc_feature 1..80: note = Synthetic: >HghCoV1-cand-19650-19729
  source 1..80: mol_type = other DNA
agcaggtttccgtttatggtgttataagacctttgatatatataatctttggtcaacttttagtagagttcaaggtcttg

SEQ ID NO: 13788 - DNA, 80 bp, synthetic construct
  misc_feature 1..80: note = Synthetic: >HKU31-cand-19720-19799
  source 1..80: mol_type = other DNA
gcaggtttccgtttatggtgttataagacctttgatatatataatctttggtcaacttttagtagagttcaaggtcttga

SEQ ID NO: 13789 - DNA, 80 bp, synthetic construct
  misc_feature 1..80: note = Synthetic: >HKU5R-cand-14550-14629
  source 1..80: mol_type = other DNA
agcagtatcacccaaattgtgtgaactgtactgatgaccgctgcgtgctacattgtgcaaatttcaatgtgctcttctca

SEQ ID NO: 13790 - DNA, 80 bp, synthetic construct
  misc_feature 1..80: note = Synthetic: >HKU4-cand-1090-1169
  source 1..80: mol_type = other DNA
cagtgtgatgacaaagagtctgttcctgaacatacatttactattggttcacaaattcttatggtgtcacctctaaaggc

SEQ ID NO: 13791 - DNA, 80 bp, synthetic construct
  misc_feature 1..80: note = Synthetic: >HKU4R-cand-1080-1159
  source 1..80: mol_type = other DNA
ttcagtgcgatgacaaagagtctgttcctgaacatacatttactattggttcacaaattcttatggtgtcacctctaaag

SEQ ID NO: 13792 - DNA, 80 bp, synthetic construct
  misc_feature 1..80: note = Synthetic: >Sk512R-cand-20080-20159
  source 1..80: mol_type = other DNA
cagttacactggtgattgtgcttctatgtacctaacagacaagttcgacctcgtcatctctgatatgtatgacggtagaa

SEQ ID NO: 13793 - DNA, 80 bp, synthetic construct
  misc_feature 1..80: note = Synthetic: >HKU8R-cand-16820-16899
  source 1..80: mol_type = other DNA
tatgatttgtccattgttaaccagagagtggcttacaaacacattgtctatgttggtgacccacaacaattgccagctcc

SEQ ID NO: 13794 - DNA, 80 bp, synthetic construct
  misc_feature 1..80: note = Synthetic: >HKU4R-cand-10590-10669
  source 1..80: mol_type = other DNA
tttgtggttcttgtggtagtgttggttacactgaaaatggaggtgtaatcaactttgtttatatgcatcagatggaatta

SEQ ID NO: 13795 - DNA, 80 bp, synthetic construct
  misc_feature 1..80: note = Synthetic: >HKU5R-cand-18000-18079
  source 1..80: mol_type = other DNA
ttttcatttctccttacaatagtcaaaatgctgtcgcccgatcagttttgggcttgaccacgcagactgttgattcatca

SEQ ID NO: 13796 - DNA, 80 bp, synthetic construct
  misc_feature 1..80: note = Synthetic: >HKU4R-cand-2360-2439
  source 1..80: mol_type = other DNA
ctcgacattatgtctaaggcaatgaagttgttgcacactaatgtttcctgggcaggtactaaattatctgccattattta

SEQ ID NO: 13797 - DNA, 80 bp, synthetic construct
  misc_feature 1..80: note = Synthetic: >HKU4R-cand-10190-10269
  source 1..80: mol_type = other DNA
ggtgctgtagagaactgtattgtgcaagttacatgtgggtctatgacattgaatggtctttggcttgataacactgtatg

SEQ ID NO: 13798 - DNA, 80 bp, synthetic construct
  misc_feature 1..80: note = Synthetic: >SEAC-cand-24360-24439
  source 1..80: mol_type = other DNA
tgaatttgcgcacaaggactcactctatgttgctattagaggtaagaaggaattaaacctttacttatctaaagcaatgg

SEQ ID NO: 13799 - DNA, 80 bp, synthetic construct
  misc_feature 1..80: note = Synthetic: >FelineAlpha1-cand-28560-28639
  source 1..80: mol_type = other DNA
taacttctatattgtaggtgaagggaatcaaagaattaatcttagattagttggtgctgtgccaaaacaaaagagattaa

SEQ ID NO: 13800 - DNA, 80 bp, synthetic construct
  misc_feature 1..80: note = Synthetic: >HKU15-cand-16980-17059
  source 1..80: mol_type = other DNA
ccaaaaggtatccctatcgtgcgcaaacctggtgttaaatatcacttctatgatcaagcacccattgtcaaacacgttca

SEQ ID NO: 13801 - DNA, 80 bp, synthetic construct
  misc_feature 1..80: note = Synthetic: >HKU17-cand-17000-17079
  source 1..80: mol_type = other DNA
tccctatcgtgcgcaagcctggtgttaaatatcacttttatgatcaagcacccattgtcaaacacgttcaaaaactaaag

SEQ ID NO: 13802 - DNA, 80 bp, synthetic construct
  misc_feature 1..80: note = Synthetic: >HKU5R-cand-25370-25449
  source 1..80: mol_type = other DNA
gtatgtgtccatggatgtaaaattcgaaaatcttactaataggcttcctccacctctccttagtaattccacagatttgg

SEQ ID NO: 13803 - DNA, 80 bp, synthetic construct
  misc_feature 1..80: note = Synthetic: >Quail-cand-16100-16179
  source 1..80: mol_type = other DNA
cttcacttaaaattgatgcatatcacaatatgttcctaacacgggatgcgtgtcgcgcctatgttcagagttggatcggc

SEQ ID NO: 13804 - DNA, 80 bp, synthetic construct
  misc_feature 1..80: note = Synthetic: >BtSk_AlphaCoV-cand-24790-24869
  source 1..80: mol_type = other DNA
ccaagaagaggctttgatgttggaagaaaacatcgttcctctgagacaagccacacatgttactggatttttgctcacca

SEQ ID NO: 13805 - DNA, 80 bp, synthetic construct
  misc_feature 1..80: note = Synthetic: >Sb512-cand-24850-24929
  source 1..80: mol_type = other DNA
tcccaagaagaggctttgatgttggaagaaaacatcgttcctctgagacaagctacacatgttactggatttttgctcac

SEQ ID NO: 13806 - DNA, 80 bp, synthetic construct
  misc_feature 1..80: note = Synthetic: >BtSk_AlphaCoV-cand-6590-6669
  source 1..80: mol_type = other DNA
gaccctcttattggtaacattttgccgttgttctatttggtattcctgattatcttcggtggcttctttgttcgcattgg

SEQ ID NO: 13807 - DNA, 80 bp, synthetic construct
  misc_feature 1..80: note = Synthetic: >Sb512-cand-6630-6709
  source 1..80: mol_type = other DNA
taaagaccctcttattggtaacattttgccgttgttctatttggtattcctgattatctttggtggcttctttgttcgca

SEQ ID NO: 13808 - DNA, 80 bp, synthetic construct
  misc_feature 1..80: note = Synthetic: >BetaSp-cand-28620-28699
  source 1..80: mol_type = other DNA
cccgcaccaatggttatcaccagccttgatatggtgaagacggtcgtgttacattaataaaacccactgacacctatacg

SEQ ID NO: 13809 - DNA, 80 bp, synthetic construct
  misc_feature 1..80: note = Synthetic: >HKU4-cand-14350-14429
  source 1..80: mol_type = other DNA
ctcttatagagtggcctttattggagtatgattatacagactataaaattggtctgtttaataaatactttaaacattgg

SEQ ID NO: 13810 - DNA, 80 bp, synthetic construct
  misc_feature 1..80: note = Synthetic: >MN690611-cand-15060-15139
  source 1..80: mol_type = other DNA
tgaatattgatactagttctaagttttgggaggaagatttttaccgccaaatgtatgagagctcacccactttacaggct

SEQ ID NO: 13811 - DNA, 80 bp, synthetic construct
  misc_feature 1..80: note = Synthetic: >MN531555-cand-10810-10889
  source 1..80: mol_type = other DNA
gttgatttacacaataaaattcttgcctctgacgatgtcggagagtgtatggataatttattgggtatgcttattacgct

SEQ ID NO: 13812 - DNA, 80 bp, synthetic construct
  misc_feature 1..80: note = Synthetic: >MN128086-cand-18730-18809
  source 1..80: mol_type = other DNA
ttcgcacactgccaaataatcgtattttgagtggactaggtgtagatgtaacccatggatttgtaatttgggattacgct

SEQ ID NO: 13813 - DNA, 80 bp, synthetic construct
  misc_feature 1..80: note = Synthetic: >MN509589-cand-2960-3039
  source 1..80: mol_type = other DNA
aggatgaggacacaaaagtgttggctcttatacaagacccagtaagtaacaagtaccctcttccccttgatgatgattat

SEQ ID NO: 13814 - DNA, 80 bp, synthetic construct
  misc_feature 1..80: note = Synthetic: >MT114541-cand-24240-24319
  source 1..80: mol_type = other DNA
taacaatacattagtcaatcttgaatggctcaacagaattgagacttatgtgaaatggccctggtatgtgtggctactaa

SEQ ID NO: 13815 - DNA, 80 bp, synthetic construct
  misc_feature 1..80: note = Synthetic: >MN509589-cand-3120-3199
  source 1..80: mol_type = other DNA
caacaattgctttgacggagctttaaagccactcccaaaagctgttgttgatgttcttggagactggggtgcagctgttg

SEQ ID NO: 13816 - DNA, 80 bp, synthetic construct
  misc_feature 1..80: note = Synthetic: >MT114538-cand-23500-23579
  source 1..80: mol_type = other DNA
caagatgtcgttaatacacaaggtcaagctttaagccacctaactgtacaattgcaaaataatttccaagccattagtag

SEQ ID NO: 13817 - DNA, 80 bp, synthetic construct
  misc_feature 1..80: note = Synthetic: >MT114541-cand-25440-25519
  source 1..80: mol_type = other DNA
tgacctcacgttgcattttgtagaccctatgcttgtaagcatagcaatacgtggcttagctcatgctgatctaactattg

SEQ ID NO: 13818 - DNA, 80 bp, synthetic construct
  misc_feature 1..80: note = Synthetic: >SBB-788-cand-18810-18889
  source 1..80: mol_type = other DNA
actggtgtgtctactaattatgtcagtgaagtagattatgtaccccttaagtccaacgtgtgtataacacgctgtaattt

SEQ ID NO: 13819 - DNA, 80 bp, synthetic construct
  misc_feature 1..80: note = Synthetic: >SBB-726-cand-18820-18899
  source 1..80: mol_type = other DNA
ctactaattatgtcagtgaagtagattatgtaccccttaagtccaacgtgtgtataacacgctgtaatttaggtggtgca

SEQ ID NO: 13820 - DNA, 80 bp, synthetic construct
  misc_feature 1..80: note = Synthetic: >SBB-726-cand-6010-6089
  source 1..80: mol_type = other DNA
aaattattgggtctacatgttagtgttaatacacttcgtgtgaacacaattagtaagagtttggtttatgcatatgcagc

SEQ ID NO: 13821 - DNA, 80 bp, synthetic construct
  misc_feature 1..80: note = Synthetic: >SBB-788-cand-6000-6079
  source 1..80: mol_type = other DNA
tcatttgagcaaattattgggtttacatgttagtgttaatacacttcgtgtgaacacaattagtaagagtttggtttatg

SEQ ID NO: 13822 - DNA, 80 bp, synthetic construct
  misc_feature 1..80: note = Synthetic: >SBB-747-cand-5990-6069
  source 1..80: mol_type = other DNA
tgcgatcttctcatttgagcaaattattgggtctacatgttagtgttaatacacttcgtgtgaacacaattagtaagagt

SEQ ID NO: 13823 - DNA, 80 bp, synthetic construct
  misc_feature 1..80: note = Synthetic: >SBB-747-cand-12310-12389
  source 1..80: mol_type = other DNA
aaatttatggttgatactccaaagggccctgctcttaagtatttgtattttactaaaggccttaaaaatttgtgtagagg

SEQ ID NO: 13824 - DNA, 80 bp, synthetic construct
  misc_feature 1..80: note = Synthetic: >SBB-797-cand-12320-12399
  source 1..80: mol_type = other DNA
ttgatactccaaagggccctgctcttaagtacttgtattttactaaaggccttaaaaatttgtgtagaggcacagttttg

SEQ ID NO: 13825 - DNA, 80 bp, synthetic construct
  misc_feature 1..80: note = Synthetic: >SBB-726-cand-8090-8169
  source 1..80: mol_type = other DNA
aagttgtggattttaaagttatggataatgctgtattaagagatataactgctgcagatcagtgttttgctaacaaattt

SEQ ID NO: 13826 - DNA, 80 bp, synthetic construct
  misc_feature 1..80: note = Synthetic: >SBB-797-cand-8080-8159
  source 1..80: mol_type = other DNA
attgattataaagttgtggattttaaagttatggataatgctgtattaagagatataactgctgcagatcagtgttttgc

SEQ ID NO: 13827 - DNA, 80 bp, synthetic construct
  misc_feature 1..80: note = Synthetic: >SBB-747-cand-8070-8149
  source 1..80: mol_type = other DNA
attgagacctattgattataaagttgtggattttaaagttatggataatgctgtattaagagatataactgctgcagatc

SEQ ID NO: 13828 - DNA, 80 bp, synthetic construct
  misc_feature 1..80: note = Synthetic: >SBB-041-cand-13870-13949
  source 1..80: mol_type = other DNA
ctcaacaaaagtgctggttacccacttaataaatttggtaaggctggtttgtactacgagtcacttacttacgacgagca

SEQ ID NO: 13829 - DNA, 80 bp, synthetic construct
  misc_feature 1..80: note = Synthetic: >SBB-010-cand-12440-12519
  source 1..80: mol_type = other DNA
ctcaactagagccctgtaatggtacagacacggatcattgtgttcgtgcctttgacatctataacaaggatgttgcatgc

SEQ ID NO: 13830 - DNA, 80 bp, synthetic construct
  misc_feature 1..80: note = Synthetic: >SBB-041-cand-12430-12509
  source 1..80: mol_type = other DNA
tctagtgctgctcaactagagccctgtaatggtacagacacggatcattgtgttcgtgcctttgacatctataacaagga

SEQ ID NO: 13831 - DNA, 80 bp, synthetic construct
  misc_feature 1..80: note = Synthetic: >PRD-0038-cand-3280-3359
  source 1..80: mol_type = other DNA
tgcagatattattgaggagtcacagagagctaaccccaccgttattgtgaatgcagctaacattcacttaaaacatggag

SEQ ID NO: 13832 - DNA, 80 bp, synthetic construct
  misc_feature 1..80: note = Synthetic: >SBB-130-cand-6820-6899
  source 1..80: mol_type = other DNA
ctcctatggacctggcaacacgtttattaacgatgttgtagctgcagaggtgtcttctgttgttaagaccacagtaaacc

SEQ ID NO: 13833 - DNA, 80 bp, synthetic construct
  misc_feature 1..80: note = Synthetic: >SBB-053-cand-6830-6909
  source 1..80: mol_type = other DNA
ggacctggcaacacgtttattaacgatgttgtggctgcagaggtgtcttctgttgttaagaccacagtaaaccccacagc

SEQ ID NO: 13834 - DNA, 80 bp, synthetic construct
  misc_feature 1..80: note = Synthetic: >SBB-726-cand-560-639
  source 1..80: mol_type = other DNA
tgcaaaaccctgcctttataatgggtgatattgatctccaactccgtaaatacgggcttggtgccaattcaccaaaggag

SEQ ID NO: 13835 - DNA, 80 bp, synthetic construct
  misc_feature 1..80: note = Synthetic: >SBB-747-cand-550-629
  source 1..80: mol_type = other DNA
ctgcttcctatgcaaaaccctgcctttataatgggtgatattgatctccaactccgtaaatatgggcttggtgccaattc

SEQ ID NO: 13836 - DNA, 80 bp, synthetic construct
  misc_feature 1..80: note = Synthetic: >229E-cand-10-89
  source 1..80: mol_type = other DNA
tctatctatagatagaaaagtcgctttttagactttgtgtctactcttctcaactaaacgaaatttttgctacggccggc

SEQ ID NO: 13837 - DNA, 80 bp, synthetic construct
  misc_feature 1..80: note = Synthetic: >229E-cand-90-169
  source 1..80: mol_type = other DNA
atctctgatgctggagtcgtggcgtaattgaaatttcatttgggttgcaacagtttggaaataagtgctgtgcgtcctag

SEQ ID NO: 13838 - DNA, 80 bp, synthetic construct
  misc_feature 1..80: note = Synthetic: >229E-cand-170-249
  source 1..80: mol_type = other DNA
tctaagggttctgtgttctgtcacgggattccattctacaaacgccttactcgaggttctgtctcgtgtttgtgtggaag

SEQ ID NO: 13839 - DNA, 80 bp, synthetic construct
  misc_feature 1..80: note = Synthetic: >229E-cand-250-329
  source 1..80: mol_type = other DNA
caaagttctgtctttgtggaaaccagtaactgttcctaatggcctgcaaccgtgtgacacttgccgtagcaagtgatact

SEQ ID NO: 13840 - DNA, 80 bp, synthetic construct
  misc_feature 1..80: note = Synthetic: >229E-cand-330-409
  source 1..80: mol_type = other DNA
gaaatttctgcaactggttgctctactattgcgctagccgtccgccgctatagcgaggccgctagcaatggatttagagc

SEQ ID NO: 13841 - DNA, 80 bp, synthetic construct
  misc_feature 1..80: note = Synthetic: >229E-cand-410-489
  source 1..80: mol_type = other DNA
atgccgatttgtttcatttggcttgcatgattgcgttgttggcattgcaaacgacgattatgtcatgggtttgcatggta

SEQ ID NO: 13842 - DNA, 80 bp, synthetic construct
  misc_feature 1..80: note = Synthetic: >229E-cand-490-569
  source 1..80: mol_type = other DNA
accaaacgttgtcctgcaatataatgaaattttctgaccgtccctttatgcttcgtggttggttggttttttccaattca

SEQ ID NO: 13843 - DNA, 80 bp, synthetic construct
  misc_feature 1..80: note = Synthetic: >229E-cand-570-649
  source 1..80: mol_type = other DNA
aattacctcttggaggagtttgatgttgtcttcggtaagagaggtggtggtaatgtgacatacactgaccagtatctctg

SEQ ID NO: 13844 - DNA, 80 bp, synthetic construct
  misc_feature 1..80: note = Synthetic: >229E-cand-650-729
  source 1..80: mol_type = other DNA
tggcgccgatggcaaacctgtcataagtgatgatttatggcagtttgttgaccattttggtgaaaacgaagaaattatca

SEQ ID NO: 13845 - DNA, 80 bp, synthetic construct
  misc_feature 1..80: note = Synthetic: >229E-cand-730-809
  source 1..80: mol_type = other DNA
tcaatggtcatacttacgtttgtgcttggcttactaagcgcaagcctttagattacaaacgtcagaacaaccttgccatt

SEQ ID NO: 13846 - DNA, 80 bp, synthetic construct
  misc_feature 1..80: note = Synthetic: >229E-cand-810-889
  source 1..80: mol_type = other DNA
gaagagattgaatatgtgcgtggcgatgctttgcatacactacgcaatggttctgttcttgaaatggctaaggaagtgaa

SEQ ID NO: 13847 - DNA, 80 bp, synthetic construct
  misc_feature 1..80: note = Synthetic: >229E-cand-890-969
  source 1..80: mol_type = other DNA
gacatctagtaaggttgtgttaagcgatgctcttgacaaactttacaaagtttttggttctcctgttatgacaaatggtt

SEQ ID NO: 13848 - DNA, 80 bp, synthetic construct
  misc_feature 1..80: note = Synthetic: >229E-cand-970-1049
  source 1..80: mol_type = other DNA
ctaacatcttagaggcctttattaaacctgtgttcattagtgcatttgttcaatgtacttgtggcaacaagtcttggtct

SEQ ID NO: 13849 - DNA, 80 bp, synthetic construct
  misc_feature 1..80: note = Synthetic: >229E-cand-1050-1129
  source 1..80: mol_type = other DNA
gtcggtgattggactggttttaaatccacctgctgtaatgtgctcagtaataaactgtgtgttgttcccggtaatgttaa

SEQ ID NO: 13850 - DNA, 80 bp, synthetic construct
  misc_feature 1..80: note = Synthetic: >229E-cand-1130-1209
  source 1..80: mol_type = other DNA
acctggtgacgctgtggttactactcagcaagctggtgttggtgttaagtacttttgtggcatgactcttaagtttgttg

SEQ ID NO: 13851 - DNA, 80 bp, synthetic construct
  misc_feature 1..80: note = Synthetic: >229E-cand-1210-1289
  source 1..80: mol_type = other DNA
caaacattgaaggtgtctctgtttggcgagtaatcgctgttcagagtgtggatggatttgttgcttctgctacttttgta

SEQ ID NO: 13852 - DNA, 80 bp, synthetic construct
  misc_feature 1..80: note = Synthetic: >AlphaCoV1-cand-27530-27609
  source 1..80: mol_type = other DNA
ggtacgccaactggtgtcactctaactttgctttcaggaaatctatatgctgaagggttcaaaatggctggtggtctgac

SEQ ID NO: 13853 - DNA, 80 bp, synthetic construct
  misc_feature 1..80: note = Synthetic: >AlphaCoV1-cand-27610-27689
  source 1..80: mol_type = other DNA
catcgagcatttgcctaaatacgtcatgattgctacacctagtagaaccatcgtctacacactagttggcaaacaattaa

SEQ ID NO: 13854 - DNA, 80 bp, synthetic construct
  misc_feature 1..80: note = Synthetic: >AlphaCoV1-cand-27690-27769
  source 1..80: mol_type = other DNA
aagcaactactgcgacaggatgggcttactatgtaaaatctaaagctggtgattactcaacagaagcacgtactgataat

SEQ ID NO: 13855 - DNA, 80 bp, synthetic construct
  misc_feature 1..80: note = Synthetic: >AlphaCoV1-cand-27770-27849
  source 1..80: mol_type = other DNA
ttgagtgaacatgaaaaattattacatatggtataaactaaacttctaatatggccacacagggacaacgcgtcaactgg

SEQ ID NO: 13856 - DNA, 80 bp, synthetic construct
  misc_feature 1..80: note = Synthetic: >AlphaCoV1-cand-27850-27929
  source 1..80: mol_type = other DNA
ggagatgaacctgcaccttccaaaagacgtggtcgttctaactctcgtggtcggaagaataataatatacctctttcatt

SEQ ID NO: 13857 - DNA, 80 bp, synthetic construct
  misc_feature 1..80: note = Synthetic: >AlphaCoV1-cand-27930-28009
  source 1..80: mol_type = other DNA
cttcaaccccattaccctcgaacaaggatcaaaattttggaacttatgtccgagagattttgttcccaaaggaataggta

SEQ ID NO: 13858 - DNA, 80 bp, synthetic construct
  misc_feature 1..80: note = Synthetic: >AlphaCoV1-cand-28010-28089
  source 1..80: mol_type = other DNA
ataaggatcaacaaattggttattggaatagacaaactcgctatcgcattgtgaaaggccagcgtaaggagcttcctgag

SEQ ID NO: 13859 - DNA, 80 bp, synthetic construct
  misc_feature 1..80: note = Synthetic: >AlphaCoV1-cand-28090-28169
  source 1..80: mol_type = other DNA
aggtggttcttctactacttaggtacaggacctcatgctgatgccaaatttaaagataagattgatggagtcttctgggt

SEQ ID NO: 13860 - DNA, 80 bp, synthetic construct
  misc_feature 1..80: note = Synthetic: >AlphaCoV1-cand-28170-28249
  source 1..80: mol_type = other DNA
tgcaaaggatggtgccatgaacaagccaacaacacttggcactcgtggaaccaataatgaatccaaacctttgaaatttg

SEQ ID NO: 13861 - DNA, 80 bp, synthetic construct
  misc_feature 1..80: note = Synthetic: >AlphaCoV1-cand-28250-28329
  source 1..80: mol_type = other DNA
atggtaaaataccaccccaatttcaacttgaagtgaatgccgtctctaggaacaattcaaggtctggttctcaatctaga

SEQ ID NO: 13862 - DNA, 80 bp, synthetic construct
  misc_feature 1..80: note = Synthetic: >AlphaCoV1-cand-28330-28409
  source 1..80: mol_type = other DNA
tctgggtctagaaatagatctcaatctagaggaagacaacaatccaataaccagaaaactaaggataacaatgttgaaga

SEQ ID NO: 13863 - DNA, 80 bp, synthetic construct
  misc_feature 1..80: note = Synthetic: >AlphaCoV1-cand-28410-28489
  source 1..80: mol_type = other DNA
tacaattgttgctgtgcttcaaaaattaggtgttaacacagaaaaaacacaaaagcaaaggtcacgttctaaatctagag

SEQ ID NO: 13864 - DNA, 80 bp, synthetic construct
  misc_feature 1..80: note = Synthetic: >AlphaCoV1-cand-28490-28569
  source 1..80: mol_type = other DNA
aacgtagtaactctaaaactagagacagacctacacctaagaatgccaacaaacacacctggaagaaaactgcaggtaag

SEQ ID NO: 13865 - DNA, 80 bp, synthetic construct
  misc_feature 1..80: note = Synthetic: >AlphaCoV1-cand-28570-28649
  source 1..80: mol_type = other DNA
ggtgatgtgacaaatttctatggtgctagaagtagttcagctaactttggtgatagtgatctcgttgccaatggtaacgc

SEQ ID NO: 13866 - DNA, 80 bp, synthetic construct
  misc_feature 1..80: note = Synthetic: >AlphaCoV1-cand-28650-28729
  source 1..80: mol_type = other DNA
tgccaaatgctaccctcagatagctgaatgtgttccatcagtgtctagcattctgtttggaagtcaatggtctgctgaag

SEQ ID NO: 13867 - DNA, 80 bp, synthetic construct
  misc_feature 1..80: note = Synthetic: >AlphaCoV1-cand-28730-28809
  source 1..80: mol_type = other DNA
aagatggagatcaagtgaaagtcacgctcacacacacctaccacctgccaaaggatgatgccaaaactagacaattccta

SEQ ID NO: 13868 - DNA, 80 bp, synthetic construct
  misc_feature 1..80: note = Synthetic: >AlphaSp-cand-22890-22969
  source 1..80: mol_type = other DNA
attggttcagcaggttgcttttgttgaggacaagattgttggtgtcattagtagtgttgctaataatactgtgttcttta

SEQ ID NO: 13869 - DNA, 80 bp, synthetic construct
  misc_feature 1..80: note = Synthetic: >AlphaSp-cand-22970-23049
  source 1..80: mol_type = other DNA
attccacaagaacatttcctggcttttattaccactctaatgataccactaattgcacctcaccaagacttgtttactcc

SEQ ID NO: 13870 - DNA, 80 bp, synthetic construct
  misc_feature 1..80: note = Synthetic: >AlphaSp-cand-23050-23129
  source 1..80: mol_type = other DNA
aatattggtgtgtgtactagtggtgccataggtttgctgaagtcacctaaagctgcacaacctcagattcaacccatgtt

SEQ ID NO: 13871 - DNA, 80 bp, synthetic construct
  misc_feature 1..80: note = Synthetic: >AlphaSp-cand-23130-23209
  source 1..80: mol_type = other DNA
ccagggtaacattagtatccctactaatttcactatgagtgtacgaactgaatatgtacagttgtttaacaaacccgttt

SEQ ID NO: 13872 - DNA, 80 bp, synthetic construct
  misc_feature 1..80: note = Synthetic: >AlphaSp-cand-23210-23289
  source 1..80: mol_type = other DNA
ctgtagactgcgcaatgtatgtctgcaatggtaatgaacgttgtaaacaattgttggctcagtatacttctgcatgtaag

SEQ ID NO: 13873 - DNA, 80 bp, synthetic construct
  misc_feature 1..80: note = Synthetic: >AlphaSp-cand-23290-23369
  source 1..80: mol_type = other DNA
aacatagaatctgcattgcagcttagtgctaggttggaatcaatggaggttaactctatgttgacagtttcagaagaggc

SEQ ID NO: 13874 - DNA, 80 bp, synthetic construct
  misc_feature 1..80: note = Synthetic: >AlphaSp-cand-23370-23449
  source 1..80: mol_type = other DNA
gcttaagcttgccaccataaaccaatttcctggtggtggttataatttcaccaatattcttccagcataacctggtgcta

SEQ ID NO: 13875 - DNA, 80 bp, synthetic construct
  misc_feature 1..80: note = Synthetic: >AlphaSp-cand-23450-23529
  source 1..80: mol_type = other DNA
ggtcagttattgaagacattttgttcgataaagttgtcactagtggtttgggcacagttgatgaagattataaacgctgc

SEQ ID NO: 13876 - DNA, 80 bp, synthetic construct
  misc_feature 1..80: note = Synthetic: >AlphaSp-cand-23530-23609
  source 1..80: mol_type = other DNA
agtaatggactgtctattgcagacttagcttgtgcgcagcattataacggcattatggttttgccgggtgttgcagattg

SEQ ID NO: 13877 - DNA, 80 bp, synthetic construct
  misc_feature 1..80: note = Synthetic: >AlphaSp-cand-23610-23689
  source 1..80: mol_type = other DNA
ggaaaaagtccatatgtattcggcttcacttgtcggtggtatgaccttgggtggtatcacttctgctgcagctttacctt

SEQ ID NO: 13878 - DNA, 80 bp, synthetic construct
  misc_feature 1..80: note = Synthetic: >AlphaSp-cand-23690-23769
  source 1..80: mol_type = other DNA
tctcatatgcagttcaggcacgacttaattatgttgcactacaaaccgatgtgctgcagcgtaatcaacaaatgctagct

SEQ ID NO: 13879 - DNA, 80 bp, synthetic construct
  misc_feature 1..80: note = Synthetic: >AlphaSp-cand-23770-23849
  source 1..80: mol_type = other DNA
aattcctttaatagcgctattagcaacatcacgttagcttttgagagcgtcaataacgctatctatcaaacctctgctgg

SEQ ID NO: 13880 - DNA, 80 bp, synthetic construct
  misc_feature 1..80: note = Synthetic: >AlphaSp-cand-23850-23929
  source 1..80: mol_type = other DNA
tttgaacacggtagcagaggcactttcgaaagttcaggatgttgttaatagtcaaggaaatgcactcaatcagctaacag

SEQ ID NO: 13881 - DNA, 80 bp, synthetic construct
  misc_feature 1..80: note = Synthetic: >AlphaSp-cand-23930-24009
  source 1..80: mol_type = other DNA
tccaattgcagaataattttcaagctatttctaattccattggtgacatttatagtaggttagatcagattactgccgat

SEQ ID NO: 13882 - DNA, 80 bp, synthetic construct
  misc_feature 1..80: note = Synthetic: >AlphaSp-cand-24010-24089
  source 1..80: mol_type = other DNA
gctcaagttgacagactcattactggtcggcttgcagctcttaatgcctttgttgcacagtcacttactaagtatgcaga

SEQ ID NO: 13883 - DNA, 80 bp, synthetic construct
  misc_feature 1..80: note = Synthetic: >AlphaSp-cand-24090-24169
  source 1..80: mol_type = other DNA
agtgcaagctagtaggacattggccaagcaaaaggttaacgagtgtgttaagtcacagtccaccaggtatgggttttgtg

SEQ ID NO: 13884 - DNA, 80 bp, synthetic construct
  misc_feature 1..80: note = Synthetic: >Anlong-cand-17550-17629
  source 1..80: mol_type = other DNA
cgttgctatagtagtgctacacacacgtactattgtttcaaccatgccacaaactgtgattacctgtacaacccttttgt

SEQ ID NO: 13885 - DNA, 80 bp, synthetic construct
  misc_feature 1..80: note = Synthetic: >Anlong-cand-17630-17709
  source 1..80: mol_type = other DNA
tattgacatacagcaatggggttatacaggatcacttagtttgaaccaccatgagcattgtaacattcatcgtaacgagc

SEQ ID NO: 13886 - DNA, 80 bp, synthetic construct
  misc_feature 1..80: note = Synthetic: >Anlong-cand-17710-17789
  source 1..80: mol_type = other DNA
atgtggcgtcaggtgatgctactatgacacgttgcctggcagtgtacgattgctttgtaaagaatgttgactggtcaatt

SEQ ID NO: 13887 - DNA, 80 bp, synthetic construct
  misc_feature 1..80: note = Synthetic: >Anlong-cand-17790-17869
  source 1..80: mol_type = other DNA
acctatccatttatttgtaacgagggtgtggttaacaagagtggccgtattgtgcaatctcacattatgcgtgcagcact

SEQ ID NO: 13888 - DNA, 80 bp, synthetic construct
  misc_feature 1..80: note = Synthetic: >Anlong-cand-17870-17949
  source 1..80: mol_type = other DNA
tgttgtgtacgatccagttgcaattcacgatattggtaatcctaagggtatacgctgtgctgttaccagtaaaccgtggt

SEQ ID NO: 13889 - DNA, 80 bp, synthetic construct
  misc_feature 1..80: note = Synthetic: >Anlong-cand-17950-18029
  source 1..80: mol_type = other DNA
actgctacgataagcaaccccttaataccaatgttcgttgcctggagtacgactatataacccatggacaaatgaatggc

SEQ ID NO: 13890 - DNA, 80 bp, synthetic construct
  misc_feature 1..80: note = Synthetic: >Anlong-cand-18030-18109
  source 1..80: mol_type = other DNA
ttgtgcctgttttggaattgtaatgttgatatgtacccagagtttagcattgtttgtaggtttgatacgcgttgtaaatc

SEQ ID NO: 13891 - DNA, 80 bp, synthetic construct
  misc_feature 1..80: note = Synthetic: >Anlong-cand-18110-18189
  source 1..80: mol_type = other DNA
tgcgctcaacctagaaggctgtaatggtgggtctttgtatgttaacaatcatgcattccacacaccagcatttgacaaac

SEQ ID NO: 13892 - DNA, 80 bp, synthetic construct
  misc_feature 1..80: note = Synthetic: >Anlong-cand-18190-18269
  source 1..80: mol_type = other DNA
gtgcttttgctaagctcaaggtaatgcctttcttttactatgatgccagtgagtgtgacaaagttcaggatcacgtcaac

SEQ ID NO: 13893 - DNA, 80 bp, synthetic construct
  misc_feature 1..80: note = Synthetic: >Anlong-cand-18270-18349
  source 1..80: mol_type = other DNA
tatgtgccattgcgtgccaacagctgtatcacacgttgtaatatcggtggtgcagtttgcagtaagcatgctgaggcata

SEQ ID NO: 13894 - DNA, 80 bp, synthetic construct
  misc_feature 1..80: note = Synthetic: >Anlong-cand-18350-18429
  source 1..80: mol_type = other DNA
taagaaatatgtggaagcctacaacacattcacgcaggcaggttttacgttgtggtgtcctacatcatttgacgtttata

SEQ ID NO: 13895 - DNA, 80 bp, synthetic construct
  misc_feature 1..80: note = Synthetic: >Anlong-cand-18430-18509
  source 1..80: mol_type = other DNA
acctgtggcagtctttctcgacttcaaatcttcagggtttggagaacatagcctttaatgttgtaaagaaaggcggtttt

SEQ ID NO: 13896 - DNA, 80 bp, synthetic construct
  misc_feature 1..80: note = Synthetic: >Anlong-cand-18510-18589
  source 1..80: mol_type = other DNA
gttggtgccgatggtgagttgcccgtcgctattatcaatgacagagtcatggttcgcgatggcttgacagacactctggt

SEQ ID NO: 13897 - DNA, 80 bp, synthetic construct
  misc_feature 1..80: note = Synthetic: >Anlong-cand-18590-18669
  source 1..80: mol_type = other DNA
ttttacaaacaaaaccacacttccgactaacgttgcctttgagttgtatgccaagcgcaaacttggtttgactcctccac

SEQ ID NO: 13898 - DNA, 80 bp, synthetic construct
  misc_feature 1..80: note = Synthetic: >Anlong-cand-18670-18749
  source 1..80: mol_type = other DNA
tcacaattctcaggaatttgggtgttatggcaacttataaacatgttctttgggattatgacgctgaacgtcctctgaca

SEQ ID NO: 13899 - DNA, 80 bp, synthetic construct
  misc_feature 1..80: note = Synthetic: >Anlong-cand-18750-18829
  source 1..80: mol_type = other DNA
ccgtacactaagtcagtttgtagttatacagattttgaccaagatgtttgtgtgtgttatgataattctataccaggttc

SEQ ID NO: 13900 - DNA, 80 bp, synthetic construct
  misc_feature 1..80: note = Synthetic: >AvianCoV-cand-18940-19019
  source 1..80: mol_type = other DNA
tgtagaaataccatcaaatctgcttgttcagaatggtatgccattaaaagatggagcgaatctgtatgtttataagcgtg

SEQ ID NO: 13901 - DNA, 80 bp, synthetic construct
  misc_feature 1..80: note = Synthetic: >AvianCoV-cand-19020-19099
  source 1..80: mol_type = other DNA
ttaatggagcgtttgttacgctaccaaacacattaaacacacagggtcgcaattatgaaacttttgaacctcgtagtgac

SEQ ID NO: 13902 - DNA, 80 bp, synthetic construct
  misc_feature 1..80: note = Synthetic: >AvianCoV-cand-19100-19179
  source 1..80: mol_type = other DNA
gttgagagagattttctcgacatgtcagaagaggattttattgaaaagtatggtaaagacttaggtctacaacacatact

SEQ ID NO: 13903 - DNA, 80 bp, synthetic construct
  misc_feature 1..80: note = Synthetic: >AvianCoV-cand-19180-19259
  source 1..80: mol_type = other DNA
ttatggtgaagttgaaaaaccacaattgggtggtttacacactgttataggtatgtacagacttttgcgtgctaataaat

SEQ ID NO: 13904 - DNA, 80 bp, synthetic construct
  misc_feature 1..80: note = Synthetic: >AvianCoV-cand-19260-19339
  source 1..80: mol_type = other DNA
taaacgcaaagtctgtaactaattcagattctgatgtcatgcaaaattattttgttttggcagacaatggttcttacaag

SEQ ID NO: 13905 - DNA, 80 bp, synthetic construct
  misc_feature 1..80: note = Synthetic: >AvianCoV-cand-19340-19419
  source 1..80: mol_type = other DNA
caggtttgcacagttgtagaccttttgcttgatgatttcttagaacttcttaggaacatacttaaagagtatggtactaa

SEQ ID NO: 13906 - DNA, 80 bp, synthetic construct
  misc_feature 1..80: note = Synthetic: >AvianCoV-cand-19420-19499
  source 1..80: mol_type = other DNA
taagtctaaagttgtaacagtgtcaattgattaccatagcataaattttatgacttggtttgaagatggcagtattaaaa

SEQ ID NO: 13907 - DNA, 80 bp, synthetic construct
  misc_feature 1..80: note = Synthetic: >AvianCoV-cand-19500-19579
  source 1..80: mol_type = other DNA
catgttatccacagcttcaatcagcatggacgtgtggttataatatgcctgaactttataaagttcagaattgtgttatg

SEQ ID NO: 13908 - DNA, 80 bp, synthetic construct
  misc_feature 1..80: note = Synthetic: >AvianCoV-cand-19580-19659
  source 1..80: mol_type = other DNA
gaaccttgcaacattccaaactatggtgttggaataacgttgccaagtggtattatgatgaatgtggcaaagtatacaca

SEQ ID NO: 13909 - DNA, 80 bp, synthetic construct
  misc_feature 1..80: note = Synthetic: >AvianCoV-cand-19660-19739
  source 1..80: mol_type = other DNA
actttgtcaatacctttctaaaacaacaatgtgtgtgccgcataatatgcgagtaatgcattttggagctggtagtgata

SEQ ID NO: 13910 - DNA, 80 bp, synthetic construct
  misc_feature 1..80: note = Synthetic: >AvianCoV-cand-19740-19819
  source 1..80: mol_type = other DNA
aaggagttgctcctggtagcactgttcttaaacagtggctacctgaaggaacactccttgttgataatgatattgtagat

SEQ ID NO: 13911 - DNA, 80 bp, synthetic construct
  misc_feature 1..80: note = Synthetic: >AvianCoV-cand-19820-19899
  source 1..80: mol_type = other DNA
tatgtatctgatgcacacgtttctgtgctttcagattgcaataaatataagacagagcacaagtttgatcttgtgatatc

SEQ ID NO: 13912 - DNA, 80 bp, synthetic construct
  misc_feature 1..80: note = Synthetic: >AvianCoV-cand-19900-19979
  source 1..80: mol_type = other DNA
tgatatgtatacagataatgattcaaagagaaaacatgaaggcatagtagccaataatggcaatgacgatgtcttcattt

SEQ ID NO: 13913 - DNA, 80 bp, synthetic construct
  misc_feature 1..80: note = Synthetic: >AvianCoV-cand-19980-20059
  source 1..80: mol_type = other DNA
atctatctaattttttaaggaacaacttagctctgggtggcagttttgctgtaaaagtaacagagacaagttggcatgag

SEQ ID NO: 13914 - DNA, 80 bp, synthetic construct
  misc_feature 1..80: note = Synthetic: >AvianCoV-cand-20060-20139
  source 1..80: mol_type = other DNA
agtttatatgacattgcacaggattgtgcatggtggacaatgttttgtacagcagtgaatgcttcttcttcagaagcatt

SEQ ID NO: 13915 - DNA, 80 bp, synthetic construct
  misc_feature 1..80: note = Synthetic: >AvianCoV-cand-20140-20219
  source 1..80: mol_type = other DNA
tttgcttggtattaattatttgggtgcaagtgaaaaggtgaaagttagtggaaaaacactgcacgcaaattatatatttt

SEQ ID NO: 13916 - DNA, 80 bp, synthetic construct
  misc_feature 1..80: note = Synthetic: >BtCoV_008_16-cand-400-479
  source 1..80: mol_type = other DNA
caatgccgctttgtgtctttaggccttcaagatattgtcgaaggagttgctgacgaagactttgtcatggttgtgacagg

SEQ ID NO: 13917 - DNA, 80 bp, synthetic construct
  misc_feature 1..80: note = Synthetic: >BtCoV_008_16-cand-480-559
  source 1..80: mol_type = other DNA
tgtcacgcagcttcgtgcctatatagacacttttggtagccgacctacaaatcttagaggttggttgcttttttcaaatt

SEQ ID NO: 13918 - DNA, 80 bp, synthetic construct
  misc_feature 1..80: note = Synthetic: >BtCoV_008_16-cand-560-639
  source 1..80: mol_type = other DNA
gtaattatttcctggaaaacctggatttaattttcggacgtcgtggtggtggtgctgttcctgttgatcagtacatgtgt

SEQ ID NO: 13919 - DNA, 80 bp, synthetic construct
  misc_feature 1..80: note = Synthetic: >BtCoV_008_16-cand-670-749
  source 1..80: mol_type = other DNA
gccgattgggaatacatggattattttggtgatgctgaggaatttattctctacggcattacctatgttaaggcatggat

SEQ ID NO: 13920 - DNA, 80 bp, synthetic construct
  misc_feature 1..80: note = Synthetic: >BtCoV_008_16-cand-750-829
  source 1..80: mol_type = other DNA
tactgagcgcgctgaagtcagttatgaaagtcagaatctttcgaccatcctgcgtatacaatattgttctacttatgtac

SEQ ID NO: 13921 - DNA, 80 bp, synthetic construct
  misc_feature 1..80: note = Synthetic: >BtCoV_008_16-cand-830-909
  source 1..80: mol_type = other DNA
acactcttgctgatggtactgtcatgaaaatggcaagtaaggccaaagttaagaagagtgttgttttgagtgagccatat

SEQ ID NO: 13922 - DNA, 80 bp, synthetic construct
  misc_feature 1..80: note = Synthetic: >BtCoV_008_16-cand-910-989
  source 1..80: mol_type = other DNA
gataaaatctacagagatgttgggtcaccttttatggacaatggtaagaacatccgccaggccgttaggaaaccagtgtt

SEQ ID NO: 13923 - DNA, 80 bp, synthetic construct
  misc_feature 1..80: note = Synthetic: >BtCoV_008_16-cand-990-1069
  source 1..80: mol_type = other DNA
tcttcatgcctttattagatgtaagtgcggtgtcacccagtggagtgtaggcgattggaagggttataaatcaccatgtt

SEQ ID NO: 13924 - DNA, 80 bp, synthetic construct
  misc_feature 1..80: note = Synthetic: >BtCoV_008_16-cand-1070-1149
  source 1..80: mol_type = other DNA
gtggtgtattttgtaaacccatttccactgttgctgcctcagctgttccgggcgctgttgtcctcacaactgaaggtgca

SEQ ID NO: 13925 - DNA, 80 bp, synthetic construct
  misc_feature 1..80: note = Synthetic: >BtCoV_008_16-cand-1150-1229
  source 1..80: mol_type = other DNA
ggtagtggcatcaagtattacaatggcctcttcttgcgccacctttgtgatgtggatgggctaggagtttggcgccttat

SEQ ID NO: 13926 - DNA, 80 bp, synthetic construct
  misc_feature 1..80: note = Synthetic: >BtCoV_008_16-cand-1230-1309
  source 1..80: mol_type = other DNA
taaggttcagtcaaatggagacttggttgtctcaggtcagactgttgagcacgatgggcttatggacccttgctacttcc

SEQ ID NO: 13927 - DNA, 80 bp, synthetic construct
  misc_feature 1..80: note = Synthetic: >BtCoV_008_16-cand-1310-1389
  source 1..80: mol_type = other DNA
taaatgacggcaatttggctactgattttaaggtcgctatgttaagtggtgactttagtcacagtgtgaagcaggccata

SEQ ID NO: 13928 - DNA, 80 bp, synthetic construct
  misc_feature 1..80: note = Synthetic: >BtCoV_008_16-cand-1390-1469
  source 1..80: mol_type = other DNA
gttgctggtcatcttagtgttggcagtcaacttattgatgtcacggaggatgtcatgggaacaccctggtttgtacgtaa

SEQ ID NO: 13929 - DNA, 80 bp, synthetic construct
  misc_feature 1..80: note = Synthetic: >BtCoV_008_16-cand-1470-1549
  source 1..80: mol_type = other DNA
acttggtgacttattctctggttgttggcaaacttttattgagtttgtgcgctcgcttaagttgcacacaagtcaacttg

SEQ ID NO: 13930 - DNA, 80 bp, synthetic construct
  misc_feature 1..80: note = Synthetic: >BtCoV_008_16-cand-1550-1629
  source 1..80: mol_type = other DNA
tagacttgtcaaagcgtcttgcttgtgctagtcttagcgttcttgatggcgcatttaaattagtcctggatgtgccagca

SEQ ID NO: 13931 - DNA, 80 bp, synthetic construct
  misc_feature 1..80: note = Synthetic: >BtCoV_008_16-cand-1630-1709
  source 1..80: mol_type = other DNA
gcactgcaatgttgtgttgacaaacttgtttcattgtttgagactctgttttctgcaacttgtgatgctgtggttgttgg

SEQ ID NO: 13932 - DNA, 80 bp, synthetic construct
  misc_feature 1..80: note = Synthetic: >HKU1-cand-4500-4579
  source 1..80: mol_type = other DNA
ataaatgttgctagacttgttaaagctgatgttattgttaatcctgctaatgggcatatgctccatggtggtggagttgc

SEQ ID NO: 13933 - DNA, 80 bp, synthetic construct
  misc_feature 1..80: note = Synthetic: >HKU1-cand-4580-4659
  source 1..80: mol_type = other DNA
aaaagctatagctgtagctgcaggtaaaaaattttctaaagaaactgctgctatggttaaatctaaaggtgtttgccaag

SEQ ID NO: 13934 - DNA, 80 bp, synthetic construct
  misc_feature 1..80: note = Synthetic: >HKU1-cand-4660-4739
  source 1..80: mol_type = other DNA
taggagattgttatgtttctaccggtggtaaattatgtaaaacaattcttaatattgtaggccctgatgctagacaagat

SEQ ID NO: 13935 - DNA, 80 bp, synthetic construct
  misc_feature 1..80: note = Synthetic: >HKU1-cand-4740-4819
  source 1..80: mol_type = other DNA
ggaagacaatcttatgttttgttagcacgtgcttataagcatcttaataattatgattgttgtttgtctactctcatatc

SEQ ID NO: 13936 - DNA, 80 bp, synthetic construct
  misc_feature 1..80: note = Synthetic: >HKU1-cand-4820-4899
  source 1..80: mol_type = other DNA
ggctggtatatttagtgttcctgctgatgtgtcattaacttaccttctaggtgttgttgataaacaagttatccttgtta

SEQ ID NO: 13937 - DNA, 80 bp, synthetic construct
  misc_feature 1..80: note = Synthetic: >HKU1-cand-4900-4979
  source 1..80: mol_type = other DNA
gtaataataaagaagattttgatattattcaaaaatgtcaaattacttcagttgttggtactaaagcattggctgttaga

SEQ ID NO: 13938 - DNA, 80 bp, synthetic construct
  misc_feature 1..80: note = Synthetic: >HKU1-cand-4980-5059
  source 1..80: mol_type = other DNA
ttaactgctaatgtaggccgtgttattaaatttgagacagatgcatacaaacttttcttgagtggtgatgattgttttgt

SEQ ID NO: 13939 - DNA, 80 bp, synthetic construct
  misc_feature 1..80: note = Synthetic: >HKU1-cand-5060-5139
  source 1..80: mol_type = other DNA
ttcaaattcttctgttatacaagaagttttattgcttcgtcatgatatacaattgaataatgacgttcgtgattatttgt

SEQ ID NO: 13940 - DNA, 80 bp, synthetic construct
  misc_feature 1..80: note = Synthetic: >HKU1-cand-5140-5219
  source 1..80: mol_type = other DNA
tgtctaagatgactagtcttcctaaagattggcgtcttatcaataaatttgatgttattaacggtgttaaaactgttaag

SEQ ID NO: 13941 - DNA, 80 bp, synthetic construct
  misc_feature 1..80: note = Synthetic: >HKU1-cand-5220-5299
  source 1..80: mol_type = other DNA
tattttgagtgtcctaattctatttatatatgtagtcagggtaaagactttggttatgtatgtgatggttctttttataa

SEQ ID NO: 13942 - DNA, 80 bp, synthetic construct
  misc_feature 1..80: note = Synthetic: >HKU1-cand-5300-5379
  source 1..80: mol_type = other DNA
agcaactgttaatcaagtttgtgttttattagctaagaagatagatgttttgcttactgtagatggtgttaattttaaat

SEQ ID NO: 13943 - DNA, 80 bp, synthetic construct
  misc_feature 1..80: note = Synthetic: >HKU1-cand-5380-5459
  source 1..80: mol_type = other DNA
ctatttctcttactgtaggtgaagtttttggtaaaatacttggtaatgttttctgtgatggcattgatgttactaagtta

SEQ ID NO: 13944 - DNA, 80 bp, synthetic construct
  misc_feature 1..80: note = Synthetic: >HKU1-cand-5460-5539
  source 1..80: mol_type = other DNA
aagtgtagtgatttttatgccgataaaattttatatcagtatgaaaatttgtctttagctgatatttctgctgtacaaag

SEQ ID NO: 13945 - DNA, 80 bp, synthetic construct
  misc_feature 1..80: note = Synthetic: >HKU1-cand-5540-5619
  source 1..80: mol_type = other DNA
ttcatttgggtttgatcagcaacaattgcttgcttactataattttttaacagtatgtaaatggtctgtagttgttaacg

SEQ ID NO: 13946 - DNA, 80 bp, synthetic construct
  misc_feature 1..80: note = Synthetic: >HKU1-cand-5620-5699
  source 1..80: mol_type = other DNA
gtccatttttttcttttgaacagtctcataataattgttatgtgaatgtagcttgtcttatgttgcagcatattaatctt

SEQ ID NO: 13947 - DNA, 80 bp, synthetic construct
  misc_feature 1..80: note = Synthetic: >HKU1-cand-5700-5779
  source 1..80: mol_type = other DNA
aaatttaataaatggcagtggcaggaagcatggtatgaatttcgtgctggcagaccacatagattagttgctcttgtttt

SEQ ID NO: 13948 - DNA, 80 bp, synthetic construct
  misc_feature 1..80: note = Synthetic: >HKU15-cand-16740-16819
  source 1..80: mol_type = other DNA
tccaccaaccatgacgcggtatgcacatatcatgctaatgcccatgttgcatcagctgatgcaatcatgacggtatgttt

SEQ ID NO: 13949 - DNA, 80 bp, synthetic construct
  misc_feature 1..80: note = Synthetic: >HKU15-cand-16820-16899
  source 1..80: mol_type = other DNA
agctatccatgaactgttcagtactgttgactggaaccttgaatttccagtaactgctgagcaatcgcaacttaacaagg

SEQ ID NO: 13950 - DNA, 80 bp, synthetic construct
  misc_feature 1..80: note = Synthetic: >HKU15-cand-17220-17299
  source 1..80: mol_type = other DNA
gttaataagcatgcttttctcacccctgagatgcatacttatgctacacataaactcaacttggctccactcatctacta

SEQ ID NO: 13951 - DNA, 80 bp, synthetic construct
  misc_feature 1..80: note = Synthetic: >HKU15-cand-17300-17379
  source 1..80: mol_type = other DNA
ctccaccacagattgtagtagtgaacagcctattgttgttacctacagagattgtgtcacccggtgcaatactggaaaaa

SEQ ID NO: 13952 - DNA, 80 bp, synthetic construct
  misc_feature 1..80: note = Synthetic: >HKU15-cand-17460-17539
  source 1..80: mol_type = other DNA
tacataccacgcaatgtcaacgtctacaactgttggcttactttcactaatctccaaaaccttgaaaacttagcttacaa

SEQ ID NO: 13953 - DNA, 80 bp, synthetic construct
  misc_feature 1..80: note = Synthetic: >HKU15-cand-17620-17699
  source 1..80: mol_type = other DNA
tcgacaataatcttgtcaaacttttcgacaaccgcactaacttacctgtctcagtggcctttgaacattacactaacagg

SEQ ID NO: 13954 - DNA, 80 bp, synthetic construct
  misc_feature 1..80: note = Synthetic: >HKU15-cand-17710-17789
  source 1..80: mol_type = other DNA
cactgccaactacacagctgttatctggtttaggcgtaaccgccaccagaaatttcactgtgtggttcgacaatgataca

SEQ ID NO: 13955 - DNA, 80 bp, synthetic construct
  misc_feature 1..80: note = Synthetic: >HKU15-cand-17790-17869
  source 1..80: mol_type = other DNA
attttccaatacactattaatgtatctacgtatactgacatcgaccctagtacccatgttgtcctctgtgatgataggta

SEQ ID NO: 13956 - DNA, 80 bp, synthetic construct
  misc_feature 1..80: note = Synthetic: >HKU15-cand-17870-17949
  source 1..80: mol_type = other DNA
cggaacagattggagtcagtttaaccaacttcctaatgcagtattcctcaccaaaactaaggtgaagaaaacagaaccgt

SEQ ID NO: 13957 - DNA, 80 bp, synthetic construct
  misc_feature 1..80: note = Synthetic: >HKU4-cand-6130-6209
  source 1..80: mol_type = other DNA
tttagtaattataacccagtttataagaaaggcgttatgcttaaaggcaagcctatcttgtgggttaataatggggtctg

SEQ ID NO: 13958 - DNA, 80 bp, synthetic construct
  misc_feature 1..80: note = Synthetic: >HKU4-cand-6210-6289
  source 1..80: mol_type = other DNA
tgacagtgcgcttaataagccgaatagagccagccttcgtcaattatacgatgtggcacctattgttcttgataataagt

SEQ ID NO: 13959 - DNA, 80 bp, synthetic construct
  misc_feature 1..80: note = Synthetic: >HKU4-cand-6290-6369
  source 1..80: mol_type = other DNA
acactgtcttacaagataatacatctcaactagtagaacataatgttccggttgttgatgatgtttcaattactactaga

SEQ ID NO: 13960 - DNA, 80 bp, synthetic construct
  misc_feature 1..80: note = Synthetic: >HKU4-cand-6370-6449
  source 1..80: mol_type = other DNA
aagttaattgaagttaaatgtaaaggtttaaataagccttttgtaaagggtaacttcagttttgttaatgatcccaatgg

SEQ ID NO: 13961 - DNA, 80 bp, synthetic construct
  misc_feature 1..80: note = Synthetic: >HKU4-cand-6450-6529
  source 1..80: mol_type = other DNA
tgttactgttgtagacacattaggtttgactgaactacgtgctttgtacgtggatattaatactagatatattgtcctta

SEQ ID NO: 13962 - DNA, 80 bp, synthetic construct
  misc_feature 1..80: note = Synthetic: >HKU4-cand-6610-6689
  source 1..80: mol_type = other DNA
gttacaagaagagcgcgtgttcttcttggtgcatcatcactttttgcaagttttgcaaaaattacagttactgcaacgac

SEQ ID NO: 13963 - DNA, 80 bp, synthetic construct
  misc_feature 1..80: note = Synthetic: >HKU4-cand-6850-6929
  source 1..80: mol_type = other DNA
agaactgctggcattgttacgactaatatagtaaaacaatgtggtacagcagcctattatatgttattaggaaaatttaa

SEQ ID NO: 13964 - DNA, 80 bp, synthetic construct
  misc_feature 1..80: note = Synthetic: >HKU4-cand-6930-7009
  source 1..80: mol_type = other DNA
gcgtgtagactggaaagctacattacgtttgtttttactattatgtacaacaattttgttgttgtcatcaatatatcatt

SEQ ID NO: 13965 - DNA, 80 bp, synthetic construct
  misc_feature 1..80: note = Synthetic: >HKU4-cand-7010-7089
  source 1..80: mol_type = other DNA
tggtaatatttaatcaagtattatcgagtgatgttatgttagaagatgctactggcattttagccatttataaagaggtg

SEQ ID NO: 13966 - DNA, 80 bp, synthetic construct
  misc_feature 1..80: note = Synthetic: >HKU4-cand-7090-7169
  source 1..80: mol_type = other DNA
cgatcttacctcggcatccgtacgttgtgtgatggtttagttgtagaataccgcaatacatcgtttgatgtaatggagtt

SEQ ID NO: 13967 - DNA, 80 bp, synthetic construct
  misc_feature 1..80: note = Synthetic: >Lucheng19-cand-6400-6479
  source 1..80: mol_type = other DNA
ataggctataccgtactctctactacattaagctttagtagtctatgtaaagaatggaccgatggctatgctaattccac

SEQ ID NO: 13968 - DNA, 80 bp, synthetic construct
  misc_feature 1..80: note = Synthetic: >Lucheng19-cand-6480-6559
  source 1..80: mol_type = other DNA
ctttataaagcaagattattgtaatggctcactaatttgttatgaatgtctcaggggttacgaagaactctccgattttc

SEQ ID NO: 13969 - DNA, 80 bp, synthetic construct
  misc_feature 1..80: note = Synthetic: >Lucheng19-cand-6560-6639
  source 1..80: mol_type = other DNA
cacatacacaagtgaaatggagctttacttataatctgagtgaatttgctatattctaccatgccttaacatttactata

SEQ ID NO: 13970 - DNA, 80 bp, synthetic construct
  misc_feature 1..80: note = Synthetic: >Lucheng19-cand-6640-6719
  source 1..80: mol_type = other DNA
atgtgggtttttggtaataaatacgttaaaacccgtttattttacttcgtgttgcaatgctggaataatgctatgtgctg

SEQ ID NO: 13971 - DNA, 80 bp, synthetic construct
  misc_feature 1..80: note = Synthetic: >Lucheng19-cand-6720-6799
  source 1..80: mol_type = other DNA
gtttgataaaacagaacccatttggctgctcaatataatcaaatttagttctatgtctgcacatggcttctcactgtttt

SEQ ID NO: 13972 - DNA, 80 bp, synthetic construct
  misc_feature 1..80: note = Synthetic: >Lucheng19-cand-6800-6879
  source 1..80: mol_type = other DNA
gcgtttacaaaatagcctgcttcgtcaaacatgttgtatttggatgcaataaacccaaatgtctgtcatgttcccgcagt

SEQ ID NO: 13973 - DNA, 80 bp, synthetic construct
  misc_feature 1..80: note = Synthetic: >Lucheng19-cand-6880-6959
  source 1..80: mol_type = other DNA
gcaaaatacgaccgtatcccgtgtgacaccattgttaatggagtgaaacgtagcttctacgtaaaagccaatggtggaaa

SEQ ID NO: 13974 - DNA, 80 bp, synthetic construct
  misc_feature 1..80: note = Synthetic: >Lucheng19-cand-6960-7039
  source 1..80: mol_type = other DNA
aaacttctgtgaaaagcatcagttcttctgccaaaattgtgacagccatggtgtgggatgcacttttataaatgaacatg

SEQ ID NO: 13975 - DNA, 80 bp, synthetic construct
  misc_feature 1..80: note = Synthetic: >Lucheng19-cand-7040-7119
  source 1..80: mol_type = other DNA
ttgcaaaagaggttgctaacgtaacaaaaacaaacgtgagagccactggtcctgcctatgtagaaattgataaagtaaca

SEQ ID NO: 13976 - DNA, 80 bp, synthetic construct
  misc_feature 1..80: note = Synthetic: >Lucheng19-cand-7120-7199
  source 1..80: mol_type = other DNA
tttgaggacggcttctactacctccacgctggtgagcagttttggaaatatgagtttgatgtctctagtaagaagtttga

SEQ ID NO: 13977 - DNA, 80 bp, synthetic construct
  misc_feature 1..80: note = Synthetic: >Lucheng19-cand-7200-7279
  source 1..80: mol_type = other DNA
ttcagaaaattgtattaaagaccttagccttactgctgattttatggtctataatgataatggcacagctagagccaatg

SEQ ID NO: 13978 - DNA, 80 bp, synthetic construct
  misc_feature 1..80: note = Synthetic: >Lucheng19-cand-7280-7359
  source 1..80: mol_type = other DNA
ctcttaatgccagtgtctatttttcacagctgttgtgcaaaccaattaaacttgttaataaagtcctgctgtcaagcctt

SEQ ID NO: 13979 - DNA, 80 bp, synthetic construct
  misc_feature 1..80: note = Synthetic: >Lucheng19-cand-7360-7439
  source 1..80: mol_type = other DNA
accatagatcatggtagcgctatgcatgaggcatattgcaaagttctgcacaatagctttaacaaggattttacaaagtg

SEQ ID NO: 13980 - DNA, 80 bp, synthetic construct
  misc_feature 1..80: note = Synthetic: >Lucheng19-cand-7440-7519
  source 1..80: mol_type = other DNA
tactgacttacaaaattgtaagagcggtgcgggtatagagtgcagagacgctacttttgagaaaggcgttaaactagctc

SEQ ID NO: 13981 - DNA, 80 bp, synthetic construct
  misc_feature 1..80: note = Synthetic: >Lucheng19-cand-7520-7599
  source 1..80: mol_type = other DNA
acaagtatgacatcctgctctgtaatgacagcgctaacaactttgtaaccacatatgccaaagccggcactagaataggt

SEQ ID NO: 13982 - DNA, 80 bp, synthetic construct
  misc_feature 1..80: note = Synthetic: >Lucheng19-cand-7600-7679
  source 1..80: mol_type = other DNA
acagcagacctcgcagtttttaacagagaatcagtgcgtgaaataaaacatgcagtactgactagaaacaaaaccactat

SEQ ID NO: 13983 - DNA, 80 bp, synthetic construct
  misc_feature 1..80: note = Synthetic: >PEDV-cand-18900-18979
  source 1..80: mol_type = other DNA
aggactcaccccacccattacgatcctacgtaacttgggtgtagtttgtacatctaagtgtgtcatttgggactatgaag

SEQ ID NO: 13984 - DNA, 80 bp, synthetic construct
  misc_feature 1..80: note = Synthetic: >PEDV-cand-18980-19059
  source 1..80: mol_type = other DNA
ccgaacgtccacttactacttttacaaaggatgtttgtaaatataccgactttgagggtgacgtctgtacactctttgat

SEQ ID NO: 13985 - DNA, 80 bp, synthetic construct
  misc_feature 1..80: note = Synthetic: >PEDV-cand-19060-19139
  source 1..80: mol_type = other DNA
aacagcattgttggttcattagagcgattctccatgacccaaaatgctgtgcttatgtcacttacagctgttaaaaagct

SEQ ID NO: 13986 - DNA, 80 bp, synthetic construct
  misc_feature 1..80: note = Synthetic: >PEDV-cand-19140-19219
  source 1..80: mol_type = other DNA
tactggcataaagttaacttatggttatcttaatggtgtcccagttaacacacatgaagataaaccttttacttggtata

SEQ ID NO: 13987 - DNA, 80 bp, synthetic construct
  misc_feature 1..80: note = Synthetic: >PEDV-cand-19220-19299
  source 1..80: mol_type = other DNA
tttacactaggaagaacggcaagttcgaggaccatcctgatggctattttacccaaggtagaacaaccgctgattttagc

SEQ ID NO: 13988 - DNA, 80 bp, synthetic construct
  misc_feature 1..80: note = Synthetic: >PEDV-cand-19300-19379
  source 1..80: mol_type = other DNA
cctcgtagcgacatggaaaaggacttcctaagtatggatatgggtctgtttattaacaagtacggacttgaagattacgg

SEQ ID NO: 13989 - DNA, 80 bp, synthetic construct
  misc_feature 1..80: note = Synthetic: >PEDV-cand-19380-19459
  source 1..80: mol_type = other DNA
ctttgagcacgttgtgtatggtgatgtttcaaaaaccacccttggtggtttgcatctactaatttcgcaggtgcgtctgg

SEQ ID NO: 13990 - DNA, 80 bp, synthetic construct
  misc_feature 1..80: note = Synthetic: >PEDV-cand-19460-19539
  source 1..80: mol_type = other DNA
cctgtatgggtgtgctcaaaatagacgagtttgtgtctagtaatgatagcacgttaaagtcttgtactgttacatatgct

SEQ ID NO: 13991 - DNA, 80 bp, synthetic construct
  misc_feature 1..80: note = Synthetic: >PEDV-cand-19540-19619
  source 1..80: mol_type = other DNA
gataaccctagtagtaagatggtttgtacgtatatggatctcctgcttgacgattttgtcagcattcttaaatctttgga

SEQ ID NO: 13992 - DNA, 80 bp, synthetic construct
  misc_feature 1..80: note = Synthetic: >PEDV-cand-19620-19699
  source 1..80: mol_type = other DNA
tttgggcgttgtatctaaagttcatgaagttatggtcgattgtaaaatgtggaggtggatgttgtggtgtaaggatcata

SEQ ID NO: 13993 - DNA, 80 bp, synthetic construct
  misc_feature 1..80: note = Synthetic: >PEDV-cand-19700-19779
  source 1..80: mol_type = other DNA
aactccagacattttatccgcaacttcaggccagtgaatggaagtgtggttattccatgccttctatttacaagatacaa

SEQ ID NO: 13994 - DNA, 80 bp, synthetic construct
  misc_feature 1..80: note = Synthetic: >PEDV-cand-19780-19859
  source 1..80: mol_type = other DNA
cgtatgtgtttagaaccttgcaatctctacaactatggtgctggtattaagttacctgatggcattatgtttaacgtagt

SEQ ID NO: 13995 - DNA, 80 bp, synthetic construct
  misc_feature 1..80: note = Synthetic: >PEDV-cand-19860-19939
  source 1..80: mol_type = other DNA
taaatacacacagctttgtcaatatctcaatagcaccacaatgtgtgtaccccatcacatgcgtgtgctacatcttggtg

SEQ ID NO: 13996 - DNA, 80 bp, synthetic construct
  misc_feature 1..80: note = Synthetic: >PEDV-cand-19940-20019
  source 1..80: mol_type = other DNA
ctggctccgacaagggtgttgcacctggcacggctgtcttacgacgttggttgccactggatgccattatagttgacaat

SEQ ID NO: 13997 - DNA, 80 bp, synthetic construct
  misc_feature 1..80: note = Synthetic: >PEDV-cand-20020-20099
  source 1..80: mol_type = other DNA
gatagtgtggattacgttagcgatgctgattatagtgttacaggagattgctctaccttatacctgtcagataagtttga

SEQ ID NO: 13998 - DNA, 80 bp, synthetic construct
  misc_feature 1..80: note = Synthetic: >PEDV-cand-20100-20179
  source 1..80: mol_type = other DNA
tttagttatatctgatatgtatgatggtaagattaaaagttgtgatggggagaacgtgtctaaagaaggcttctttccct

SEQ ID NO: 13999 - DNA, 80 bp, synthetic construct
  misc_feature 1..80: note = Synthetic: >Sparrow-cand-11540-11619
  source 1..80: mol_type = other DNA
tttaagcaccaagactaactgcgctcggtttaaaactaaacgcagtgccttaccattacctaacaagggtgatgttgatc

SEQ ID NO: 14000 - DNA, 80 bp, synthetic construct
  misc_feature 1..80: note = Synthetic: >Sparrow-cand-11620-11699
  source 1..80: mol_type = other DNA
tctactttgttactaagcagtgttcagcaaaagtcttcgaaatcgaagaaaaatgctacaatgctcttagtactgaacta

SEQ ID NO: 14001 - DNA, 80 bp, synthetic construct
  misc_feature 1..80: note = Synthetic: >Sparrow-cand-11700-11779
  source 1..80: mol_type = other DNA
tatactactgatgaatcatttggtgttcttgccaaaactgaatttttcaagtttgacaaaatacccaatgttaatcgtca

SEQ ID NO: 14002 - DNA, 80 bp, synthetic construct
  misc_feature 1..80: note = Synthetic: >Sparrow-cand-11780-11859
  source 1..80: mol_type = other DNA
gtatttgactaaatacactctcctcgacctagcctatgccctacggcatttatctacgtctagagatgtaattcaagaaa

SEQ ID NO: 14003 - DNA, 80 bp, synthetic construct
  misc_feature 1..80: note = Synthetic: >Sparrow-cand-11860-11939
  source 1..80: mol_type = other DNA
tacttatgaccatgtgtggtactcctgaagactggtttggggagaattggtttgatccaatcgagaacccatccttctac

SEQ ID NO: 14004 - DNA, 80 bp, synthetic construct
  misc_feature 1..80: note = Synthetic: >Sparrow-cand-12100-12179
  source 1..80: mol_type = other DNA
aacctggtaatggatgtgtggacttagcttcatactattcatacttaatgcctatcatgtccatgactcacatgttaaag

SEQ ID NO: 14005 - DNA, 80 bp, synthetic construct
  misc_feature 1..80: note = Synthetic: >Sparrow-cand-12180-12259
  source 1..80: mol_type = other DNA
tgtgagtgtatggatagtgaaggcaaaccccttgaatatgatggattccagtacgacttcacagactttaagcttgcgct

SEQ ID NO: 14006 - DNA, 80 bp, synthetic construct
  misc_feature 1..80: note = Synthetic: >Sparrow-cand-12260-12339
  source 1..80: mol_type = other DNA
gtttgagaagtactttaaatactgggaccgtccatatcaccctaacactgtagattgtccagatgaccgttgtgttttgc

SEQ ID NO: 14007 - DNA, 80 bp, synthetic construct
  misc_feature 1..80: note = Synthetic: >Sparrow-cand-12340-12419
  source 1..80: mol_type = other DNA
actgtgcgaacttcaatgtgttgtttgctatgtgcataccaaatacggcttttggcaatttatgttctagagccactgtt

SEQ ID NO: 14008 - DNA, 80 bp, synthetic construct
  misc_feature 1..80: note = Synthetic: >Sparrow-cand-12430-12509
  source 1..80: mol_type = other DNA
ttgtggtccaaacagtgggtgtacatcttaaagagcttggtatagtcctaaatcaggatgttaccacgcacatggctaat

SEQ ID NO: 14009 - DNA, 80 bp, synthetic construct
  misc_feature 1..80: note = Synthetic: >Sparrow-cand-12510-12589
  source 1..80: mol_type = other DNA
attaacctaaacactcttttgcgactagtaggtgatcccaccactatcgcaagtgtctctgacaagtgtttagacttaag

SEQ ID NO: 14010 - DNA, 80 bp, synthetic construct
  misc_feature 1..80: note = Synthetic: >HKU17-cand-24480-24559
  source 1..80: mol_type = other DNA
caaacgcaaccccaacaatcctaaacatcagctgctacctctccgatttccaaccggagatggcccagctcaaggtttca

SEQ ID NO: 14011 - DNA, 80 bp, synthetic construct
  misc_feature 1..80: note = Synthetic: >MbCoV1-cand-18100-18179
  source 1..80: mol_type = other DNA
ttgtgattacatctctacttcttcagatgtaatcatctttgtactttgggcaggtggtttggaacttactactatgcgtt

SEQ ID NO: 14012 - DNA, 80 bp, synthetic construct
  misc_feature 1..80: note = Synthetic: >MsbCoV1-cand-18080-18159
  source 1..80: mol_type = other DNA
tacagatgtgttgtgattacatctctacttcttcagatgtcatcatctttgtactttgggcaggtggtttggaacttact

SEQ ID NO: 14013 - DNA, 80 bp, synthetic construct
  misc_feature 1..80: note = Synthetic: >HKU4R-cand-5400-5479
  source 1..80: mol_type = other DNA
cagctaaaatggtgtggagagagtggtgtactctttgtggtattcgtgatattgaatatacaggcatgcgtgcatgcgtt

SEQ ID NO: 14014 - DNA, 80 bp, synthetic construct
  misc_feature 1..80: note = Synthetic: >SEAC-cand-23560-23639
  source 1..80: mol_type = other DNA
tgatatgagcaagcttaacattagtgctgaaattcagcttattaatgaaattgctcataacgtctctaacatgcgcgttg

SEQ ID NO: 14015 - DNA, 80 bp, synthetic construct
  misc_feature 1..80: note = Synthetic: >HKU23-cand-21300-21379
  source 1..80: mol_type = other DNA
tttggaacgggggtgcctatagcctttttgatatggctaaattcccgcttaagttggctggtactgccgtaataaattta

SEQ ID NO: 14016 - DNA, 80 bp, synthetic construct
  misc_feature 1..80: note = Synthetic: >SEAC-cand-21880-21959
  source 1..80: mol_type = other DNA
ccgtaacaatcagtcttttgggttgctttatagaagtttcgattgtaatcagcttcatattaaatctgcacgttttgtgg

SEQ ID NO: 14017 - DNA, 80 bp, synthetic construct
  misc_feature 1..80: note = Synthetic: >HKU2R-cand-3010-3089
  source 1..80: mol_type = other DNA
tactacaatgttccagaatattttatctatgatgaggaaggtggtaatgaccttaatttggatgttatggtctccgagtg

SEQ ID NO: 14018 - DNA, 80 bp, synthetic construct
  misc_feature 1..80: note = Synthetic: >HKU4R-cand-1640-1719
  source 1..80: mol_type = other DNA
tgggataaagttgttgagacagcaaatctgtttctcgaaaaagcccagcgttctcttaatttctgtcagcagtttgctct

SEQ ID NO: 14019 - DNA, 80 bp, synthetic construct
  misc_feature 1..80: note = Synthetic: >HKU4-cand-1650-1729
  source 1..80: mol_type = other DNA
ggataaagttgttgagacagcaaatctgtttctcgaaaaagcccagcgttctcttaatttctgtcagcagtttgctctta

SEQ ID NO: 14020 - DNA, 80 bp, synthetic construct
  misc_feature 1..80: note = Synthetic: >HKU10R-cand-16950-17029
  source 1..80: mol_type = other DNA
agcagagctcttggtcttcagatacaaactgtcgattcatctcaaggcagtgaatatgattatgtcatttttacacaaac

SEQ ID NO: 14021 - DNA, 80 bp, synthetic construct
  misc_feature 1..80: note = Synthetic: >HKU5R-cand-14390-14469
  source 1..80: mol_type = other DNA
tcttatttaatgcctgtgctttctatgaccaactgtttggccgctgaaacacacagggattgtgatttaactaagcctct

SEQ ID NO: 14022 - DNA, 80 bp, synthetic construct
  misc_feature 1..80: note = Synthetic: >HKU5R-cand-5120-5199
  source 1..80: mol_type = other DNA
gtcagaagctgaaaaggctgtacttagtgaagtctatggaacagcagatgcagcatttctgcacaggtattactccctct

SEQ ID NO: 14023 - DNA, 80 bp, synthetic construct
  misc_feature 1..80: note = Synthetic: >MbCoV1-cand-16260-16339
  source 1..80: mol_type = other DNA
tgaaagaagttattggacctcgtgaatcgcttctcagttgggaagttggtaaagtaaagcctcctctcaatagaaactct

SEQ ID NO: 14024 - DNA, 80 bp, synthetic construct
  misc_feature 1..80: note = Synthetic: >MsbCoV1-cand-16240-16319
  source 1..80: mol_type = other DNA
gctgctactttgaaagaagtcattggacctcgtgaattgcttctcagttgggaagttggtaaagtaaagcctcctctcaa

SEQ ID NO: 14025 - DNA, 80 bp, synthetic construct
  misc_feature 1..80: note = Synthetic: >Quail-cand-320-399
  source 1..80: mol_type = other DNA
agataggataaaaccccctatcgggtcgctcttaaggcgtttcctccacgggatagccactagtgactaggtgtaagtga

SEQ ID NO: 14026 - DNA, 80 bp, synthetic construct
  misc_feature 1..80: note = Synthetic: >BetaSp-cand-25340-25419
  source 1..80: mol_type = other DNA
tttggtagcataactatagataaatttgccattccaaatagtagaaaggttgatctacagtttggaagttcagggtacat

SEQ ID NO: 14027 - DNA, 80 bp, synthetic construct
  misc_feature 1..80: note = Synthetic: >HKU2R-cand-2440-2519
  source 1..80: mol_type = other DNA
gagtttattcaaaccactgtttctgctcttaccatttgcggcattagtgccaagtactatgcttttgacaagcctatgct

SEQ ID NO: 14028 - DNA, 80 bp, synthetic construct
  misc_feature 1..80: note = Synthetic: >SEAC-cand-2610-2689
  source 1..80: mol_type = other DNA
tattcaaactactgtgtctgttcttactatctgcggcattagtgccaagtactatgcttttgacaagcctatgctttgta

SEQ ID NO: 14029 - DNA, 80 bp, synthetic construct
  misc_feature 1..80: note = Synthetic: >HKU5R-cand-15590-15669
  source 1..80: mol_type = other DNA
gcccgtaagcatagtacttgttgtactaatactgatagattttaccgcttagcaaatgagtgcgctcaagtgcttagtga

SEQ ID NO: 14030 - DNA, 80 bp, synthetic construct
  misc_feature 1..80: note = Synthetic: >HKU17-cand-15340-15419
  source 1..80: mol_type = other DNA
tctgtgaatgcccgcttggtctacaatcacattgtatatgttggtgacccttatcagttaccttcacctagaactatgct

SEQ ID NO: 14031 - DNA, 80 bp, synthetic construct
  misc_feature 1..80: note = Synthetic: >HKU4-cand-13870-13949
  source 1..80: mol_type = other DNA
ttgacgttgataaaactaaaactccacacatagtacgtcagagtttgactgagtatactatgatggatttagtatatgct

SEQ ID NO: 14032 - DNA, 80 bp, synthetic construct
  misc_feature 1..80: note = Synthetic: >HKU4R-cand-13870-13949
  source 1..80: mol_type = other DNA
gataaaactaaaaccccacacatagtacgtcagagtttgactgagtatactatgatggatttagtatatgctttgcgcca

SEQ ID NO: 14033 - DNA, 80 bp, synthetic construct
  misc_feature 1..80: note = Synthetic: >HghCoV1-cand-18210-18289
  source 1..80: mol_type = other DNA
agcatatgcaccaacgtatatgagtgtagatgaaaaatttaagactaatgatgagctttgtgtgaatttgaatatacccg

SEQ ID NO: 14034 - DNA, 80 bp, synthetic construct
  misc_feature 1..80: note = Synthetic: >Sb512-cand-19960-20039
  source 1..80: mol_type = other DNA
tgttacacttaggtgctggttctgataagggtgtcgcacctggtactgcagttttgcgcaggtggttaccccttgatgct

SEQ ID NO: 14035 - DNA, 80 bp, synthetic construct
  misc_feature 1..80: note = Synthetic: >BtSk_AlphaCoV-cand-19910-19989
  source 1..80: mol_type = other DNA
gtgtgttacacttaggtgctggttctgataagggtgtcgcacctggtactgcagttctgcgcaggtggttaccccttgat

SEQ ID NO: 14036 - DNA, 80 bp, synthetic construct
  misc_feature 1..80: note = Synthetic: >MsbCoV1-cand-18320-18399
  source 1..80: mol_type = other DNA
gttacaccggttctcttagctctaatcaccatcagcattgtaatgttcatagaaatgagcatgttgcttcaggtgatgct

SEQ ID NO: 14037 - DNA, 80 bp, synthetic construct
  misc_feature 1..80: note = Synthetic: >MbCoV1-cand-18340-18419
  source 1..80: mol_type = other DNA
ttctcttagctctaatcaccatcagcattgtaatgttcatagaaatgagcatgttgcttcaggtgatgctattatgacta

SEQ ID NO: 14038 - DNA, 80 bp, synthetic construct
  misc_feature 1..80: note = Synthetic: >HKU8R-cand-18420-18499
  source 1..80: mol_type = other DNA
ccgcactcaaagtgtataatccaaaggctatccatgatattggaaatcctaagggtatacgttgtgctgttactgatgct

SEQ ID NO: 14039 - DNA, 80 bp, synthetic construct
  misc_feature 1..80: note = Synthetic: >BtRf_AlphaCoV-cand-17610-17689
  source 1..80: mol_type = other DNA
gctattatgactagatgtcttgcaattcatgattgttttgtaaaaaatgttgactggtctatcacatacccgtttattgc

SEQ ID NO: 14040 - DNA, 80 bp, synthetic construct
  misc_feature 1..80: note = Synthetic: >MbCoV1-cand-2570-2649
  source 1..80: mol_type = other DNA
tagtgagttcatgaacactgtcaagaatatcatttctatcggcagtatcaaatgttaccactatggctttgtgaaacctg

SEQ ID NO: 14041 - DNA, 80 bp, synthetic construct
  misc_feature 1..80: note = Synthetic: >MsbCoV1-cand-2560-2639
  source 1..80: mol_type = other DNA
tgagttcatgaatactgttaagaatatcatttctatcggcagtatcaaatgttaccactatggctttgtgaaacctgttc

SEQ ID NO: 14042 - DNA, 80 bp, synthetic construct
  misc_feature 1..80: note = Synthetic: >HKU5R-cand-14950-15029
  source 1..80: mol_type = other DNA
taagggctttttcaaggaagggtcctcagtcacattaaggcatttcttcttcgcgcaagatggacatgctgctattactg

SEQ ID NO: 14043 - DNA, 80 bp, synthetic construct
  misc_feature 1..80: note = Synthetic: >Sk512R-cand-20240-20319
  source 1..80: mol_type = other DNA
ctgggtggaacagttgctattaaaataactgagttcagctggaataaaaagctctatgaactcatacagaagtttgagta

SEQ ID NO: 14044 - DNA, 80 bp, synthetic construct
  misc_feature 1..80: note = Synthetic: >HKU5R-cand-3530-3609
  source 1..80: mol_type = other DNA
tgaaactgtcagtaagctctcagttgacacgccagttggtgatgtcacacaggatgatgctacaagcagcaatgctactg

SEQ ID NO: 14045 - DNA, 80 bp, synthetic construct
  misc_feature 1..80: note = Synthetic: >HKU5-cand-3520-3599
  source 1..80: mol_type = other DNA
tcgatagtactgaaactgtcagtaagctctcagttgatacgccagttggtgatgtcacacaggatgatgctacaagcagc

SEQ ID NO: 14046 - DNA, 80 bp, synthetic construct
  misc_feature 1..80: note = Synthetic: >HKU5R-cand-28170-28249
  source 1..80: mol_type = other DNA
ggtttaacgaactctctaaatatggcgtcgagcaatgttaccctcactaatgatgaggttctcaggcttgttaaagactg

SEQ ID NO: 14047 - DNA, 80 bp, synthetic construct
  misc_feature 1..80: note = Synthetic: >SEAC-cand-25400-25479
  source 1..80: mol_type = other DNA
ctttatcaaatagtagtgataacttgacagaaaatgacagattgctgcatttagtctaaactaaacgaatatggccactg

SEQ ID NO: 14048 - DNA, 80 bp, synthetic construct
  misc_feature 1..80: note = Synthetic: >HKU5R-cand-29130-29209
  source 1..80: mol_type = other DNA
ttggcggagacaggacaggaaaattaacactggaaacggaacaaaacctctggcccccaggtggtatttctactacactg

SEQ ID NO: 14049 - DNA, 80 bp, synthetic construct
  misc_feature 1..80: note = Synthetic: >SEAC-cand-21640-21719
  source 1..80: mol_type = other DNA
tgattttgtctccactggtgctttcgtttgtgagagtaatcccgaagctcctaagactggggtttgtgtgacatacactg

SEQ ID NO: 14050 - DNA, 80 bp, synthetic construct
  misc_feature 1..80: note = Synthetic: >HKU4R-cand-14350-14429
  source 1..80: mol_type = other DNA
gagtggcctttattggagtatgattatacagactataaaataggtctgtttaataaatactttaaacattgggatcaaac

SEQ ID NO: 14051 - DNA, 80 bp, synthetic construct
  misc_feature 1..80: note = Synthetic: >Sk512R-cand-1890-1969
  source 1..80: mol_type = other DNA
gatagagttgaattctctagtgttaaccttaaaatggttgacgaggaatttccactgaatcccgtggggcacactgtggc

SEQ ID NO: 14052 - DNA, 80 bp, synthetic construct
  misc_feature 1..80: note = Synthetic: >HKU5R-cand-16000-16079
  source 1..80: mol_type = other DNA
tatcgcatctattcaaaattttaaggagactctgtactatcagaataatgtcttcatgtcagaggctaaatgctgggtgg

SEQ ID NO: 14053 - DNA, 80 bp, synthetic construct
  misc_feature 1..80: note = Synthetic: >HKU12-cand-26220-26299
  source 1..80: mol_type = other DNA
ttgttgaaactcatttataatactatatggagaaagttaaaggactgtactactttgtaggtgtagcagtcgcccagtgg

SEQ ID NO: 14054 - DNA, 80 bp, synthetic construct
  misc_feature 1..80: note = Synthetic: >Quail-cand-25710-25789
  source 1..80: mol_type = other DNA
ctcaacttttgttgagccacaattttaatcctaattggagaaagtcaaaggactgtactactttgtaggtgtagcagtcg

SEQ ID NO: 14055 - DNA, 80 bp, synthetic construct
  misc_feature 1..80: note = Synthetic: >SEAC-cand-15690-15769
  source 1..80: mol_type = other DNA
ctgttgcaatgggaagttgggaaggcccgtcctcctcttaacaggaattctgttttcacctgctttcaaattagtaagga

SEQ ID NO: 14056 - DNA, 80 bp, synthetic construct
  misc_feature 1..80: note = Synthetic: >HKU5R-cand-24320-24399
  source 1..80: mol_type = other DNA
ccagcctcttcaggcgggattgaatggtgattttaacttgacaatgcttcaaatacctcaagttactacaggtgaacgta

SEQ ID NO: 14057 - DNA, 80 bp, synthetic construct
  misc_feature 1..80: note = Synthetic: >Alpha2-cand-26330-26409
  source 1..80: mol_type = other DNA
ttgagtgagcatgaaaaattattacatatggtataaactaaacttctattatggctggaaacggcaaccgcgtgaactgg

SEQ ID NO: 14058 - DNA, 80 bp, synthetic construct
  misc_feature 1..80: note = Synthetic: >AlphaMink-cand-26340-26419
  source 1..80: mol_type = other DNA
tgagtgagcatgaaaaattattacatatggtataaactaaacttctattatggctggaaacggcaaccgcgtgaactggg

SEQ ID NO: 14059 - DNA, 80 bp, synthetic construct
  misc_feature 1..80: note = Synthetic: >WIV16-cand-7930-8009
  source 1..80: mol_type = other DNA
tggagatagtactgaagtttctgttaagatgtttgatgcttatgtcgacaccttttcagcaacttttagtgttcctatgg

SEQ ID NO: 14060 - DNA, 80 bp, synthetic construct
  misc_feature 1..80: note = Synthetic: >MT114541-cand-25360-25439
  source 1..80: mol_type = other DNA
agagctgcaccgcttatgagaagttctcacagctctatttatgtcacattgtatggtggcataaattatatgtttgtgaa

SEQ ID NO: 14061 - DNA, 80 bp, synthetic construct
  misc_feature 1..80: note = Synthetic: >MN531554-cand-8810-8889
  source 1..80: mol_type = other DNA
gtcgtgcttggttggcttattcacttgaccaatatagaaatagtggcgtagaaatggtttatactccacctcgttactct

SEQ ID NO: 14062 - DNA, 80 bp, synthetic construct
  misc_feature 1..80: note = Synthetic: >AJ311317-cand-15050-15129
  source 1..80: mol_type = other DNA
tggatatagacaagggtagtaaattttgggaacaggagttctatgagaatatgtatagagctcctacgactttacaatct

SEQ ID NO: 14063 - DNA, 80 bp, synthetic construct
  misc_feature 1..80: note = Synthetic: >MN517816-cand-20570-20649
  source 1..80: mol_type = other DNA
ttactactcaacttaacaatgcaggcaatgcgtctgtctgtattggtggtagtattcaaggcggctatgtatttaatgct

SEQ ID NO: 14064 - DNA, 80 bp, synthetic construct
  misc_feature 1..80: note = Synthetic: >MT114542-cand-20700-20779
  source 1..80: mol_type = other DNA
taatggaacaaaaatctatggtcttgagtggaatgatgaatctgttacagcttacattagtggtcgttctcacaacctga

SEQ ID NO: 14065 - DNA, 80 bp, synthetic construct
  misc_feature 1..80: note = Synthetic: >NC_010800-cand-24960-25039
  source 1..80: mol_type = other DNA
cattcaaccccgagtctagtgccgtaggttcaatactcctcacaaatggtcaacaatgtaattttgctatagagagtgtg

SEQ ID NO: 14066 - DNA, 80 bp, synthetic construct
  misc_feature 1..80: note = Synthetic: >MN517816-cand-24890-24969
  source 1..80: mol_type = other DNA
cttttaatcctgagagcaatgccgtaggttcaatactcctaacaaatggtcaacaatgtaattttgctatagagagtgtg

SEQ ID NO: 14067 - DNA, 80 bp, synthetic construct
  misc_feature 1..80: note = Synthetic: >MT114538-cand-25020-25099
  source 1..80: mol_type = other DNA
cactctgagttttgtaattgttagcaaccatgtcattgttaataatacagcaaatgtgcattctacacaacaagaacatg

SEQ ID NO: 14068 - DNA, 80 bp, synthetic construct
  misc_feature 1..80: note = Synthetic: >MT114541-cand-24960-25039
  source 1..80: mol_type = other DNA
cactctgagttttgtaattgttagcaatcatgttattgctaacaacacagcaaatgtgcattctacacaacaagaacatg

SEQ ID NO: 14069 - DNA, 80 bp, synthetic construct
  misc_feature 1..80: note = Synthetic: >MN531554-cand-6330-6409
  source 1..80: mol_type = other DNA
gtattgcaaggatataacatgtgaagtgtgcaagagagttgcgcgcagcaacagacatgaggttagcgttgttgtaagtg

SEQ ID NO: 14070 - DNA, 80 bp, synthetic construct
  misc_feature 1..80: note = Synthetic: >SBB-010-cand-13240-13319
  source 1..80: mol_type = other DNA
aagtactggggtcaggattatcaccctaattgtgtagactgtcatgatgaaatgtgtgttgttcactgtgctaattttaa

SEQ ID NO: 14071 - DNA, 80 bp, synthetic construct
  misc_feature 1..80: note = Synthetic: >SBB-041-cand-13230-13309
  source 1..80: mol_type = other DNA
gaagtactttaagtactggggtcaggattatcaccctaattgtgtagactgtcatgatgaaatgtgtgttgttcactgtg

SEQ ID NO: 14072 - DNA, 80 bp, synthetic construct
  misc_feature 1..80: note = Synthetic: >SBB-726-cand-11350-11429
  source 1..80: mol_type = other DNA
cataatgaaattttagcctctagttcgccatcggaggcgtttgaggcttttgtttcattgttgtcagtgttgctatcttt

SEQ ID NO: 14073 - DNA, 80 bp, synthetic construct
  misc_feature 1..80: note = Synthetic: >SBB-788-cand-11360-11439
  source 1..80: mol_type = other DNA
ttttagcctctaattcgccatcagaggcgtttgaggcttttgtttcattgttgtcggtgttgctatctttaccgggagca

SEQ ID NO: 14074 - DNA, 80 bp, synthetic construct
  misc_feature 1..80: note = Synthetic: >SBB-130-cand-26870-26949
  source 1..80: mol_type = other DNA
atctttgtgtatattccttggatctctgctttagtctttggtgagcacattatggaaagatacatggattgctgggcttt

SEQ ID NO: 14075 - DNA, 80 bp, synthetic construct
  misc_feature 1..80: note = Synthetic: >SBB-053-cand-26860-26939
  source 1..80: mol_type = other DNA
ctttgtgtatattccttggatctctgctttagtctttggtgagcacattatggaaagatacatggattgctgggctttga

SEQ ID NO: 14076 - DNA, 80 bp, synthetic construct
  misc_feature 1..80: note = Synthetic: >SBB-010-cand-26870-26949
  source 1..80: mol_type = other DNA
tttgtgtatattccttggatctctgctttagtctttggtgagcacattatggaaagatacatggattgctgggctttgat

SEQ ID NO: 14077 - DNA, 80 bp, synthetic construct
  misc_feature 1..80: note = Synthetic: >SBB-788-cand-12880-12959
  source 1..80: mol_type = other DNA
gtactagtggagtagcccgtctagtacccctaggttctggtgttcaaccagatgtagtattaagggcttttgacatttgt

SEQ ID NO: 14078 - DNA, 80 bp, synthetic construct
  misc_feature 1..80: note = Synthetic: >SBB-726-cand-12870-12949
  source 1..80: mol_type = other DNA
cgagttaggggtactagtggagtagcccgtctagtacccctaggctctggtgttcaaccagatgtagtattaagggcttt

SEQ ID NO: 14079 - DNA, 80 bp, synthetic construct
  misc_feature 1..80: note = Synthetic: >SBB-747-cand-3830-3909
  source 1..80: mol_type = other DNA
tgaattatggtaaggaaaagggtttgttaatacctgttgttattgattatccagcatttactaaagttttaaagcgcttt

SEQ ID NO: 14080 - DNA, 80 bp, synthetic construct
  misc_feature 1..80: note = Synthetic: >SBB-726-cand-4800-4879
  source 1..80: mol_type = other DNA
accgtgggttagtagagcctatgatgcgcttaagggtggtaatccgttacctatggctgaggtgctcattgcactaggta

SEQ ID NO: 14081 - DNA, 80 bp, synthetic construct
  misc_feature 1..80: note = Synthetic: >SBB-747-cand-9030-9109
  source 1..80: mol_type = other DNA
tatcgcatgtatgatgcatgtttcatttttaataatgtttgctggcgttgtacccttatgggtcactatactatatatag

SEQ ID NO: 14082 - DNA, 80 bp, synthetic construct
  misc_feature 1..80: note = Synthetic: >SBB-788-cand-9040-9119
  source 1..80: mol_type = other DNA
atgatgcatgtttcatttttaataatgtttgctggcgttgtacccttatgggtcactatactatatatagtggttgtatt

SEQ ID NO: 14083 - DNA, 80 bp, synthetic construct
  misc_feature 1..80: note = Synthetic: >SBB-797-cand-3200-3279
  source 1..80: mol_type = other DNA
actacgttaaggctaatggtcccttacaaccaggtggccatgttttactaaattcacacggattggccacacatggtatt

SEQ ID NO: 14084 - DNA, 80 bp, synthetic construct
  misc_feature 1..80: note = Synthetic: >SBB-747-cand-3190-3269
  source 1..80: mol_type = other DNA
gagtctagtgactacgttaaggctaatggtcccttacaaccaggtggccatgttttgctaaattcacacggattggccac

SEQ ID NO: 14085 - DNA, 80 bp, synthetic construct
  misc_feature 1..80: note = Synthetic: >SBB-747-cand-7270-7349
  source 1..80: mol_type = other DNA
gagttgaaaggcgcggcgccatcatttaatgtacttatttttgacgccacgaatcgtattgaggaaacagcagttaagaa

SEQ ID NO: 14086 - DNA, 80 bp, synthetic construct
  misc_feature 1..80: note = Synthetic: >SBB-797-cand-7280-7359
  source 1..80: mol_type = other DNA
gcgcggcgccatcatttaatgtacttatttttgacgccacgaatcgtattgaggaaacagcagttaagaatgctgctatc

SEQ ID NO: 14087 - DNA, 80 bp, synthetic construct
  misc_feature 1..80: note = Synthetic: >SBB-726-cand-7290-7369
  source 1..80: mol_type = other DNA
atcatttaatgtacttatttttgacgccacgaatcgtattgaggagacagcagttaagaatgctgctatctattacgcac

SEQ ID NO: 14088 - DNA, 80 bp, synthetic construct
  misc_feature 1..80: note = Synthetic: >SBB-797-cand-7840-7919
  source 1..80: mol_type = other DNA
tttataaagttaagcgagtctgtaaggcgtcaattacgtgttgctgctcgaaagactggtcttaatttgtttgttactac

SEQ ID NO: 14089 - DNA, 80 bp, synthetic construct
  misc_feature 1..80: note = Synthetic: >SBB-726-cand-7850-7929
  source 1..80: mol_type = other DNA
tgagcgagtctgtaaggcgtcaactacgtgttgctgctcgaaagactggtcttaatttgtttgttactacttctagttta

SEQ ID NO: 14090 - DNA, 80 bp, synthetic construct
  misc_feature 1..80: note = Synthetic: >SBB-130-cand-9540-9619
  source 1..80: mol_type = other DNA
acaacattaacaatggtaaggttgaattctgctatttacaccagttggagctcggcagcggttgtcacgtaggttccaat

SEQ ID NO: 14091 - DNA, 80 bp, synthetic construct
  misc_feature 1..80: note = Synthetic: >SBB-053-cand-9550-9629
  source 1..80: mol_type = other DNA
taacaatggtaaggttgaattttgctatttacaccagttggagctcggcagtggttgtcacgtaggttccaattttgatg

SEQ ID NO: 14092 - DNA, 80 bp, synthetic construct
  misc_feature 1..80: note = Synthetic: >SBB-130-cand-4910-4989
  source 1..80: mol_type = other DNA
cctccactagatgtgttgagaaaagcacttaaatgctgtgactgttcatttattgttgacacgcataccaaacacgttgt

SEQ ID NO: 14093 - DNA, 80 bp, synthetic construct
  misc_feature 1..80: note = Synthetic: >SBB-024-cand-4920-4999
  source 1..80: mol_type = other DNA
tagatgtgttgagaaaagcacttaaatgctgtgactgttcatttattgttgacattcatactagacacgttgtaacagag

SEQ ID NO: 14094 - DNA, 80 bp, synthetic construct
  misc_feature 1..80: note = Synthetic: >SBB-010-cand-4930-5009
  source 1..80: mol_type = other DNA
gagaaaagcacttaaatgctgtgactgttcatttatcgttgacacgcacaccaaacacgttgtaacagagtgttttgacg

SEQ ID NO: 14095 - DNA, 80 bp, synthetic construct
  misc_feature 1..80: note = Synthetic: >SBB-130-cand-23600-23679
  source 1..80: mol_type = other DNA
ggaaaagctgcaaaagttcacgcaatatatcaagtggtcgtggtggcagtggttgctaattgctgctggcctaacgttgt

SEQ ID NO: 14096 - DNA, 80 bp, synthetic construct
  misc_feature 1..80: note = Synthetic: >SBB-041-cand-23590-23669
  source 1..80: mol_type = other DNA
agctgcaaaagttcacgcaatatatcaagtggtcgtggtggcagtggttgttaatagctgctggcctaacgttgttggct

SEQ ID NO: 14097 - DNA, 80 bp, synthetic construct
  misc_feature 1..80: note = Synthetic: >SBB-788-cand-1760-1839
  source 1..80: mol_type = other DNA
cgcttagaacttttgttcgcgctgaggaggagcgtctggcacatttttgtggcagtgtgtgtgcacctattaatagttgt

SEQ ID NO: 14098 - DNA, 80 bp, synthetic construct
  misc_feature 1..80: note = Synthetic: >SBB-053-cand-13470-13549
  source 1..80: mol_type = other DNA
tcgtttgaatattaatgagttgttgcaatttgtgacagacccctctcttcttgtagcctcgtctcctgctcttgttgacc

SEQ ID NO: 14099 - DNA, 80 bp, synthetic construct
  misc_feature 1..80: note = Synthetic: >SBB-024-cand-13490-13569
  source 1..80: mol_type = other DNA
tgttgcaatttgtgacagacccctctcttcttgtagcttcatctcctgctcttgttgaccaacgtactgtttgcttttct

SEQ ID NO: 14100 - DNA, 80 bp, synthetic construct
  misc_feature 1..80: note = Synthetic: >SBB-130-cand-4430-4509
  source 1..80: mol_type = other DNA
ggtgatcgtactgttaagtgtttttgttacacacatacagagcgtgacaagatcacagattttcttgaagctctgactgt

SEQ ID NO: 14101 - DNA, 80 bp, synthetic construct
  misc_feature 1..80: note = Synthetic: >SBB-010-cand-4430-4509
  source 1..80: mol_type = other DNA
gctggtgaccgcactgttaagtgtttttgttacacacatgcagagcgtgacaagatcacagattttcttgaagctctgac

SEQ ID NO: 14102 - DNA, 80 bp, synthetic construct
  misc_feature 1..80: note = Synthetic: >SBB-041-cand-4440-4519
  source 1..80: mol_type = other DNA
gcactgttaagtgtttttgttacacacatgcagagcgtgacaagatcacagactttcttgaagctttgactgtggttgct

SEQ ID NO: 14103 - DNA, 80 bp, synthetic construct
  misc_feature 1..80: note = Synthetic: >SBB-747-cand-1270-1349
  source 1..80: mol_type = other DNA
ggtttgattaagccgggttgtgtcatgttattggacaagagtcctggcatgcgtgttatacctggtaatcgcacctatgt

SEQ ID NO: 14104 - DNA, 80 bp, synthetic construct
  misc_feature 1..80: note = Synthetic: >SBB-726-cand-1280-1359
  source 1..80: mol_type = other DNA
agccgggttgtgtcatgttattggacaagagtcctggcatgcgcgttatacctggtaatcgtacctatgttgcttttgga

SEQ ID NO: 14105 - DNA, 80 bp, synthetic construct
  misc_feature 1..80: note = Synthetic: >SBB-747-cand-5510-5589
  source 1..80: mol_type = other DNA
tgtcgtcatgtcagaacccgcagttagcagagtcttttaataaggctattaatgctaccaagaagggtcctatgaagttg

SEQ ID NO: 14106 - DNA, 80 bp, synthetic construct
  misc_feature 1..80: note = Synthetic: >SBB-797-cand-5520-5599
  source 1..80: mol_type = other DNA
tcagaacccgcagttagcagagtcttttaataaggctattaatgctaccaaaaagggtcctatgaagttgctaactatgt

SEQ ID NO: 14107 - DNA, 80 bp, synthetic construct
  misc_feature 1..80: note = Synthetic: >SBB-130-cand-5390-5469
  source 1..80: mol_type = other DNA
ttcttgactggtaaagtggctaagtttgtacattggttgtactggtttgttaatgccaataaaggcgaacctggtgatgt

SEQ ID NO: 14108 - DNA, 80 bp, synthetic construct
  misc_feature 1..80: note = Synthetic: >SBB-010-cand-3550-3629
  source 1..80: mol_type = other DNA
acccatggtacaaaagtgttacgaagtaaccaataatatatggggtgctgcaggtgacgttgctcattgcttagagaagc

SEQ ID NO: 14109 - DNA, 80 bp, synthetic construct
  misc_feature 1..80: note = Synthetic: >SBB-041-cand-3560-3639
  source 1..80: mol_type = other DNA
caaaagtgttacgaagtaaccaataatatctggggtgctgcaggtgacgttgctcattgcttagagaagctgctttgtga

SEQ ID NO: 14110 - DNA, 80 bp, synthetic construct
  misc_feature 1..80: note = Synthetic: >SBB-726-cand-4640-4719
  source 1..80: mol_type = other DNA
accctaatattatagctcgtgctatgagcattaggaagactgtacagacatggccatacacggtacttgacggtagagtc

SEQ ID NO: 14111 - DNA, 80 bp, synthetic construct
  misc_feature 1..80: note = Synthetic: >SBB-747-cand-4630-4709
  source 1..80: mol_type = other DNA
ggtgttgatgaccctaatattatagctcgtgctatgagcataaggaagactgtacagacatggccatatacggtacttga

SEQ ID NO: 14112 - DNA, 80 bp, synthetic construct
  misc_feature 1..80: note = Synthetic: >SBB-797-cand-18890-18969
  source 1..80: mol_type = other DNA
aggtggtgcagtttgtaaaaagcatgctgatgagtacagaacatttctggaaagttataatactatggtaagcgcagggt

SEQ ID NO: 14113 - DNA, 80 bp, synthetic construct
  misc_feature 1..80: note = Synthetic: >SBB-726-cand-18900-18979
  source 1..80: mol_type = other DNA
gtttgtaaaaagcatgctgatgagtacagaacatttctggaaagttataatactatggtaagcgcagggtttaccctatg

SEQ ID NO: 14114 - DNA, 80 bp, synthetic construct
  misc_feature 1..80: note = Synthetic: >SBB-797-cand-6640-6719
  source 1..80: mol_type = other DNA
tatatacttatgcttttagaagctttttgtgcttacttgttgtacacaccggcactgcctattgtaggtgttttggcggt

SEQ ID NO: 14115 - DNA, 80 bp, synthetic construct
  misc_feature 1..80: note = Synthetic: >SBB-726-cand-6650-6729
  source 1..80: mol_type = other DNA
tgcttttagaagctttttgtgcttacttgttgtacacaccggcactgcctattgtaggtgttttggcggtattgcattta

SEQ ID NO: 14116 - DNA, 80 bp, synthetic construct
  misc_feature 1..80: note = Synthetic: >SBB-747-cand-6630-6709
  source 1..80: mol_type = other DNA
tgactacacatatatacttatgcttttagaagctttttgtgcttatttgttgtacacaccggcactgcctattgtaggtg

SEQ ID NO: 14117 - DNA, 80 bp, synthetic construct
  misc_feature 1..80: note = Synthetic: >SBB-130-cand-12550-12629
  source 1..80: mol_type = other DNA
tttaggaacttggagtacaaggatgcatactttgttattaagaggtgtcctaagtctgtcatggaacatgagcagtccat

SEQ ID NO: 14118 - DNA, 80 bp, synthetic construct
  misc_feature 1..80: note = Synthetic: >SBB-024-cand-12550-12629
  source 1..80: mol_type = other DNA
cgttttaggaacttggagtacaaggatgcatactttgttattaagaggtgtcctaagtctgtcatggaacatgagcagtc

SEQ ID NO: 14119 - DNA, 80 bp, synthetic construct
  misc_feature 1..80: note = Synthetic: >SBB-120-cand-12560-12639
  source 1..80: mol_type = other DNA
acttggagtataaggatgcatactttgttattaagaggtgtcctaagtctgtcatggaacatgagcagtccatatatgac

SEQ ID NO: 14120 - DNA, 80 bp, synthetic construct
  misc_feature 1..80: note = Synthetic: >SBB-726-cand-7770-7849
  source 1..80: mol_type = other DNA
tagtgcacgctatgttaacgctaatgtcgcaaagagcgcggctgttaacttgatttggcgttatgcagattttataaagt

SEQ ID NO: 14121 - DNA, 80 bp, synthetic construct
  misc_feature 1..80: note = Synthetic: >SBB-797-cand-7760-7839
  source 1..80: mol_type = other DNA
ttatgaccgctagtgcacgctatgttaatgccaatgtcgcaaagagcgcggctgttaacttgatttggcgttatgcagat

SEQ ID NO: 14122 - DNA, 80 bp, synthetic construct
  misc_feature 1..80: note = Synthetic: >SBB-747-cand-7750-7829
  source 1..80: mol_type = other DNA
gttggtcagtttatgactgctagtgcacgctatgttaacgctaatgtcgcaaagagcgcggctgttaacttgatttggcg

SEQ ID NO: 14123 - DNA, 80 bp, synthetic construct
  misc_feature 1..80: note = Synthetic: >SBB-747-cand-7190-7269
  source 1..80: mol_type = other DNA
actttgatagtgacggtgaacgtagttatgaacggtttcctatggatgcttttactaatgttagtaagttgcattactca

SEQ ID NO: 14124 - DNA, 80 bp, synthetic construct
  misc_feature 1..80: note = Synthetic: >SBB-797-cand-7200-7279
  source 1..80: mol_type = other DNA
tgacggtgaacgtagttatgaacggtttcctatggatgcttttactaatgttagtaagttgcattactcagagttgaaag

SEQ ID NO: 14125 - DNA, 80 bp, synthetic construct
  misc_feature 1..80: note = Synthetic: >SBB-726-cand-7210-7289
  source 1..80: mol_type = other DNA
cgtagttatgaacggtttcctatggatgcttttactaatgttagtaagttgcattactcagagttgaaaggcgcggcgcc

SEQ ID NO: 14126 - DNA, 80 bp, synthetic construct
  misc_feature 1..80: note = Synthetic: >SBB-747-cand-11030-11109
  source 1..80: mol_type = other DNA
acttttgcacgtgttactttggtgtatttaatttaattaataagttatttagatgcaccttaggtaattatgagtatgtc

SEQ ID NO: 14127 - DNA, 80 bp, synthetic construct
  misc_feature 1..80: note = Synthetic: >SBB-797-cand-11040-11119
  source 1..80: mol_type = other DNA
gtgttactttggtgtgtttaatttaattaataagttatttagatgcaccttaggtaattatgagtatgtcgttagttcgc

SEQ ID NO: 14128 - DNA, 80 bp, synthetic construct
  misc_feature 1..80: note = Synthetic: >SBB-130-cand-10740-10819
  source 1..80: mol_type = other DNA
cacctagaggtgtttttgattcattggctttgtcagtgcgtcttattggtattggtggtgagaagacaattaaaatttct

SEQ ID NO: 14129 - DNA, 80 bp, synthetic construct
  misc_feature 1..80: note = Synthetic: >SBB-053-cand-24070-24149
  source 1..80: mol_type = other DNA
agtctacattcctgtgttatgctactttaacgctgctgtggatgctagtgtcatctttgcttgtgtgttcggcagactct

SEQ ID NO: 14130 - DNA, 80 bp, synthetic construct
  misc_feature 1..80: note = Synthetic: >SBB-010-cand-24080-24159
  source 1..80: mol_type = other DNA
ttgctaatctacattcctgtgttatgctactttaatgctgctgtggatgctagtgtcatctttgcttgtgtgttcggcag

SEQ ID NO: 14131 - DNA, 80 bp, synthetic construct
  misc_feature 1..80: note = Synthetic: >SBB-726-cand-8570-8649
  source 1..80: mol_type = other DNA
ctgaagttgtttcagctggtgttcacatagtcaagactatggccatggaatactgtaaagtaggacgttgtgacgtatct

SEQ ID NO: 14132 - DNA, 80 bp, synthetic construct
  misc_feature 1..80: note = Synthetic: >SBB-788-cand-8560-8639
  source 1..80: mol_type = other DNA
ataaggtttcctgaagttgtttcagctggtgttcacatagttaagactatggccatggaatactgtaaagtaggacgttg

SEQ ID NO: 14133 - DNA, 80 bp, synthetic construct
  misc_feature 1..80: note = Synthetic: >SBB-747-cand-8550-8629
  source 1..80: mol_type = other DNA
tgcgggttacataaggtttcccgaagttgtttcagctggtgttcacatagttaagactatggccatggaatactgtaaag

SEQ ID NO: 14134 - DNA, 80 bp, synthetic construct
  misc_feature 1..80: note = Synthetic: >PDF-2386-cand-15840-15919
  source 1..80: mol_type = other DNA
agatggtacacttatgattgagagatttgtatctttagcaatagatgcatacccacttactaaacatcctaatcaggaat

SEQ ID NO: 14135 - DNA, 80 bp, synthetic construct
  misc_feature 1..80: note = Synthetic: >PRD-0038-cand-15830-15909
  source 1..80: mol_type = other DNA
tcgttaaaacagatggtacacttatgattgagagatttgtatctttagcaatagatgcatacccacttactaaacatcct

SEQ ID NO: 14136 - DNA, 80 bp, synthetic construct
  misc_feature 1..80: note = Synthetic: >PDF-2386-cand-18800-18879
  source 1..80: mol_type = other DNA
agattaactcagcatgtagaaaggttcaacacatggttgtaaaatcagcactccttgctgacaaatttcaagttcttcac

SEQ ID NO: 14137 - DNA, 80 bp, synthetic construct
  misc_feature 1..80: note = Synthetic: >PRD-0038-cand-18790-18869
  source 1..80: mol_type = other DNA
gatgaacttaagattaactcagcatgtagaaaggttcaacacatggttgtaaaatcagcactccttgctgataaatttcg

SEQ ID NO: 14138 - DNA, 80 bp, synthetic construct
  misc_feature 1..80: note = Synthetic: >SBB-797-cand-13840-13919
  source 1..80: mol_type = other DNA
agatttacgttgatggtgtgccatttgtagtttccactggttaccattatagagagttaggtgttgttatgaaccaagat

SEQ ID NO: 14139 - DNA, 80 bp, synthetic construct
  misc_feature 1..80: note = Synthetic: >SBB-747-cand-13830-13909
  source 1..80: mol_type = other DNA
ttagttcagaagatttacgttgatggtgtgccatttgtagtttccactggttaccattatagagagttaggtgttgttat

SEQ ID NO: 14140 - DNA, 80 bp, synthetic construct
  misc_feature 1..80: note = Synthetic: >SBB-010-cand-6080-6159
  source 1..80: mol_type = other DNA
tttgcgtctgcgcctgagcgtactggtattatacttagtcgtagtgttaagtataatttcaaagcatgcaaacaactgct

SEQ ID NO: 14141 - DNA, 80 bp, synthetic construct
  misc_feature 1..80: note = Synthetic: >PDF-2386-cand-17360-17439
  source 1..80: mol_type = other DNA
tgtgtcgtcttatgaaaacaattggtcctgacatgttccttggcacctgtcgccgttgccctgccgaaattgtagacact

SEQ ID NO: 14142 - DNA, 80 bp, synthetic construct
  misc_feature 1..80: note = Synthetic: >PRD-0038-cand-17350-17429
  source 1..80: mol_type = other DNA
tttaattcagtgtgtcgtcttatgaaaacaattggtcctgacatgttccttggcacctgtcgccgttgccctgccgaaat

SEQ ID NO: 14143 - DNA, 80 bp, synthetic construct
  misc_feature 1..80: note = Synthetic: >SBB-120-cand-14240-14319
  source 1..80: mol_type = other DNA
agtgtgatagagctctgcctaacatgattaggatgatatccgcaatgatcttgggttctaaacatgttacatgctgtaac

SEQ ID NO: 14144 - DNA, 80 bp, synthetic construct
  misc_feature 1..80: note = Synthetic: >SBB-130-cand-14230-14309
  source 1..80: mol_type = other DNA
tacccaaagtgtgatagagctttgcctaacatgattaggatgatatccgcaatgatcttgggttctaaacatgttacatg

SEQ ID NO: 14145 - DNA, 80 bp, synthetic construct
  misc_feature 1..80: note = Synthetic: >SBB-122-cand-14240-14319
  source 1..80: mol_type = other DNA
agtgtgatagagctttgcctaacatgattaggatgatatccgcgatgattttgggttctaaacatgttacatgctgtaat

SEQ ID NO: 14146 - DNA, 80 bp, synthetic construct
  misc_feature 1..80: note = Synthetic: >PDF-2370-cand-7600-7679
  source 1..80: mol_type = other DNA
agttaaaaatggaacactgtacttgtatttccaaaaggctggtaaaattacttatgagagacatttactttcccattttg

SEQ ID NO: 14147 - DNA, 80 bp, synthetic construct
  misc_feature 1..80: note = Synthetic: >PDF-2386-cand-17120-17199
  source 1..80: mol_type = other DNA
agttcaaggttaattctacattagagcaatacgtgttttgtactgttaatgcgttaccagaaactacagctgacatcgta

SEQ ID NO: 14148 - DNA, 80 bp, synthetic construct
  misc_feature 1..80: note = Synthetic: >PRD-0038-cand-17110-17189
  source 1..80: mol_type = other DNA
tgctttgacaagttcaaggttaattctacattagagcaatacgtgttttgtactgttaatgctttaccagaaaccacagc

SEQ ID NO: 14149 - DNA, 80 bp, synthetic construct
  misc_feature 1..80: note = Synthetic: >SBB-041-cand-6270-6349
  source 1..80: mol_type = other DNA
tttgttctcagtatgtcaaggactatggtcagtctaacttcaataagggagatttctgtgatagtgtcacatgtagaact

SEQ ID NO: 14150 - DNA, 80 bp, synthetic construct
  misc_feature 1..80: note = Synthetic: >SBB-130-cand-6260-6339
  source 1..80: mol_type = other DNA
gacactctttgttctcagtatgtcaaggactatggtcagtctaactttaataagggagatttctgtgatagtgtcacatg

SEQ ID NO: 14151 - DNA, 80 bp, synthetic construct
  misc_feature 1..80: note = Synthetic: >PRD-0038-cand-18870-18949
  source 1..80: mol_type = other DNA
agttcttcacgacattggtaatccaaaggctataaaatgtgtgccacaagctgacgtagattggaaattctacgatgcac

SEQ ID NO: 14152 - DNA, 80 bp, synthetic construct
  misc_feature 1..80: note = Synthetic: >SBB-747-cand-8710-8789
  source 1..80: mol_type = other DNA
cagcagcagggtgtttattgtggcaccaatgttttagatctgtttatgagtatgctattgccaatttttgctcctgtagg

SEQ ID NO: 14153 - DNA, 80 bp, synthetic construct
  misc_feature 1..80: note = Synthetic: >SBB-726-cand-8730-8809
  source 1..80: mol_type = other DNA
tggcaccaatgttttagatctgtttatgagtatgctattgccaatttttgctcctgtaggtgccgttgatataacgacat

SEQ ID NO: 14154 - DNA, 80 bp, synthetic construct
  misc_feature 1..80: note = Synthetic: >SBB-788-cand-80-159
  source 1..80: mol_type = other DNA
atcatacgtcacagtgggtttcgttccgctgtgcgtaagttgcacacaaattttagtgtagcttttgtgttaggcacttc

SEQ ID NO: 14155 - DNA, 80 bp, synthetic construct
  misc_feature 1..80: note = Synthetic: >SBB-053-cand-12670-12749
  source 1..80: mol_type = other DNA
catgattttttcacctggaaagatgggcgtgcagtttatggtaacattagtcgtcagaatttgactaagtacaccatgat

SEQ ID NO: 14156 - DNA, 80 bp, synthetic construct
  misc_feature 1..80: note = Synthetic: >SBB-010-cand-12680-12759
  source 1..80: mol_type = other DNA
tcacatggaaagatgggcgtgcagtttatggtaacattagtcgtcagaatttgactaagtacaccatgatggatctcgtc

SEQ ID NO: 14157 - DNA, 80 bp, synthetic construct
  misc_feature 1..80: note = Synthetic: >SBB-726-cand-19540-19619
  source 1..80: mol_type = other DNA
tttggtatgctatgagaaaggacggtgcatttgtgcaacttacagatgggtattttactcagtctcgtacgctgaatgat

SEQ ID NO: 14158 - DNA, 80 bp, synthetic construct
  misc_feature 1..80: note = Synthetic: >SBB-797-cand-19530-19609
  source 1..80: mol_type = other DNA
ggtactgcattttggtatgctatgagaaaggacggtgcatttgtgcaacttacagatgggtattttactcagtctcgtac

SEQ ID NO: 14159 - DNA, 80 bp, synthetic construct
  misc_feature 1..80: note = Synthetic: >SBB-130-cand-14150-14229
  source 1..80: mol_type = other DNA
ctaaattttatggtggttgggacaacatgttgcgtacacttattgatggtgtagagaacccttgtcttatgggttgggat

SEQ ID NO: 14160 - DNA, 80 bp, synthetic construct
  misc_feature 1..80: note = Synthetic: >SBB-120-cand-14160-14239
  source 1..80: mol_type = other DNA
ttatggtggttgggacaacatgttgcgtacacttattgatggtgtagagaacccttgtcttatgggttgggattacccta

SEQ ID NO: 14161 - DNA, 80 bp, synthetic construct
  misc_feature 1..80: note = Synthetic: >PDF-2386-cand-10560-10639
  source 1..80: mol_type = other DNA
ttcttaacagatatactactactctgaatgactttaatctagtggctatgaagtacaattatgaacctctatcacaagat

SEQ ID NO: 14162 - DNA, 80 bp, synthetic construct
  misc_feature 1..80: note = Synthetic: >PDF-2370-cand-3680-3759
  source 1..80: mol_type = other DNA
gtcataaatgatgagaacatctataaagagttgacaagtagacctaaccaagatgctgtgcaagaagagccactagagac

SEQ ID NO: 14163 - DNA, 80 bp, synthetic construct
  misc_feature 1..80: note = Synthetic: >PDF-2386-cand-3040-3119
  source 1..80: mol_type = other DNA
tgacgatgaggatgaggacgaagaggtggtagaaacacctattgagtatggcacagaagatgactacacaggtgcgccac

SEQ ID NO: 14164 - DNA, 80 bp, synthetic construct
  misc_feature 1..80: note = Synthetic: >PRD-0038-cand-6720-6799
  source 1..80: mol_type = other DNA
gtgttaagagtggttttaaattttgcttggatgcattatctgtgtatgtcagatcatctaagtttcatagcctaatgtca

SEQ ID NO: 14165 - DNA, 80 bp, synthetic construct
  misc_feature 1..80: note = Synthetic: >SBB-053-cand-9630-9709
  source 1..80: mol_type = other DNA
gtgttatgtatggtggttttgaagatcaaccaacattacaagttgaaggtgctgaccatcttattaccattaatgttcta

SEQ ID NO: 14166 - DNA, 80 bp, synthetic construct
  misc_feature 1..80: note = Synthetic: >SBB-130-cand-9620-9699
  source 1..80: mol_type = other DNA
tttgatggtgttatgtatggtggttttgaagatcaaccaacattacaagttgaaggtgctgaccatcttattaccattaa

SEQ ID NO: 14167 - DNA, 80 bp, synthetic construct
  misc_feature 1..80: note = Synthetic: >PRD-0038-cand-4640-4719
  source 1..80: mol_type = other DNA
tcttacagagactggtcctattcaggtcaaaagactgaattaggagttgaatttttgactagaggtgataaaaaaattta

SEQ ID NO: 14168 - DNA, 80 bp, synthetic construct
  misc_feature 1..80: note = Synthetic: >SBB-788-cand-20090-20169
  source 1..80: mol_type = other DNA
taaggtgcagaatgctgttttggaaccatgtttgttacataattatggccaggcggctagactgccatctggtacactta

SEQ ID NO: 14169 - DNA, 80 bp, synthetic construct
  misc_feature 1..80: note = Synthetic: >Anlong-cand-26500-26579
  source 1..80: mol_type = other DNA
gtggtgtgggttagcaaagcgaatgctgaccttaaaccgactgaccttggaaccagatctaaggctagaagtctcattac

SEQ ID NO: 14170 - DNA, 80 bp, synthetic construct
  misc_feature 1..80: note = Synthetic: >Anlong-cand-26580-26659
  source 1..80: mol_type = other DNA
tccaaaatttgacattgagttgcctgacgatattgaaatcgtcgacaagtcctctgcaccaaattcgcggggaaattcgc

SEQ ID NO: 14171 - DNA, 80 bp, synthetic construct
  misc_feature 1..80: note = Synthetic: >Anlong-cand-26660-26739
  source 1..80: mol_type = other DNA
gtagccagagcagaggtgcaaagagcggttcgaagagtcgcggcaactcccagacacgtgacaactccaagtctcgtgac

SEQ ID NO: 14172 - DNA, 80 bp, synthetic construct
  misc_feature 1..80: note = Synthetic: >Anlong-cand-26740-26819
  source 1..80: mol_type = other DNA
aattccaataacagaggaaaatctcagtctcgtaataactcacgcagtcgcggacagcagcgtaataacaaccagcaacg

SEQ ID NO: 14173 - DNA, 80 bp, synthetic construct
  misc_feature 1..80: note = Synthetic: >Anlong-cand-26820-26899
  source 1..80: mol_type = other DNA
ccagggctctggtaacgcaggtaataacactgctgacctcgctgccgcaattgtgctggcccttgaaaaagctggtcttg

SEQ ID NO: 14174 - DNA, 80 bp, synthetic construct
  misc_feature 1..80: note = Synthetic: >Anlong-cand-26900-26979
  source 1..80: mol_type = other DNA
caagagacactgagaaggctcctaaaaaggagagtcctaataataataaaaaacagaagtccagagcaagttctcctgct

SEQ ID NO: 14175 - DNA, 80 bp, synthetic construct
  misc_feature 1..80: note = Synthetic: >Anlong-cand-26980-27059
  source 1..80: mol_type = other DNA
ccagctcagtccaagaacacagaccaactgactaaggtcgtgtggaaacgcatacctgaccccagttgcaatgtgaaaca

SEQ ID NO: 14176 - DNA, 80 bp, synthetic construct
  misc_feature 1..80: note = Synthetic: >Anlong-cand-27060-27139
  source 1..80: mol_type = other DNA
atgctttggaccacgctctacttaccagaacttcggcgacgaagatgctgttgagaaaggtgtgcgtgccaagcactacc

SEQ ID NO: 14177 - DNA, 80 bp, synthetic construct
  misc_feature 1..80: note = Synthetic: >Anlong-cand-27140-27219
  source 1..80: mol_type = other DNA
catcatgggctgaactgacaccaacaactgctgcactgcttttcggcggtgaagtaatgacggttgaggatggtgaagat

SEQ ID NO: 14178 - DNA, 80 bp, synthetic construct
  misc_feature 1..80: note = Synthetic: >Anlong-cand-27220-27299
  source 1..80: mol_type = other DNA
atcgtcatccaatatacctaccaaatgagagtgccgaaaacaacaccggctctccagacattcctgccacaggtgagtgc

SEQ ID NO: 14179 - DNA, 80 bp, synthetic construct
  misc_feature 1..80: note = Synthetic: >Anlong-cand-27300-27379
  source 1..80: mol_type = other DNA
cttcgccaatgctagcggagatgacgaatctgaatcaggacaggacatgccagttgttacaagtgctgccgaaagtgctg

SEQ ID NO: 14180 - DNA, 80 bp, synthetic construct
  misc_feature 1..80: note = Synthetic: >Anlong-cand-27380-27459
  source 1..80: mol_type = other DNA
cacctgcaccagctcctacacctccaaaactcaatcccaaagccgagacctttgtgccgcctaaagttgaccccaactat

SEQ ID NO: 14181 - DNA, 80 bp, synthetic construct
  misc_feature 1..80: note = Synthetic: >Anlong-cand-27460-27539
  source 1..80: mol_type = other DNA
ttcgcaggcatgaaggttgagatcatgaacaaaactatctcagatgacagtacggtttaaactcgacgaaatctcttgat

SEQ ID NO: 14182 - DNA, 80 bp, synthetic construct
  misc_feature 1..80: note = Synthetic: >Anlong-cand-27540-27619
  source 1..80: mol_type = other DNA
ttcgggctactagagccggagtttgtagtaattactaattgctgtctctaagatgtttgaagaacttcgcaatcttgatc

SEQ ID NO: 14183 - DNA, 80 bp, synthetic construct
  misc_feature 1..80: note = Synthetic: >Anlong-cand-27620-27699
  source 1..80: mol_type = other DNA
tcgaaggtatgatcatagtcatttggcttttgggtgccacaggctatatcttcatctaccagtggtggtatacatggttt

SEQ ID NO: 14184 - DNA, 80 bp, synthetic construct
  misc_feature 1..80: note = Synthetic: >Anlong-cand-27700-27779
  source 1..80: mol_type = other DNA
atgaccggtgtgctgccagctgatacctggtttgtaatgctacttcttgtgctcttttgcctcccagcttttggagaaat

SEQ ID NO: 14185 - DNA, 80 bp, synthetic construct
  misc_feature 1..80: note = Synthetic: >Beluga-cand-7460-7539
  source 1..80: mol_type = other DNA
taataaatatgctggttttaatgattggtattacggttttgtaggtcgttatccttacaattctgtagattgtccagttg

SEQ ID NO: 14186 - DNA, 80 bp, synthetic construct
  misc_feature 1..80: note = Synthetic: >Beluga-cand-7540-7619
  source 1..80: mol_type = other DNA
ttgttgcgttaaccacaattatggatgccaatatgaagggtgctatagttcctggttatgctggtaatatggcttggctt

SEQ ID NO: 14187 - DNA, 80 bp, synthetic construct
  misc_feature 1..80: note = Synthetic: >Beluga-cand-7620-7699
  source 1..80: mol_type = other DNA
aatggtcaaattgttcactataggcatgaattttcatggtttacaggcagcagtgctgagggcattgttggctatacacg

SEQ ID NO: 14188 - DNA, 80 bp, synthetic construct
  misc_feature 1..80: note = Synthetic: >Beluga-cand-7700-7779
  source 1..80: mol_type = other DNA
tgatatcgttgtctatggagaagactttattaagtctcttgctttgattagcgctaggtgtgttaaattgatgatggtgt

SEQ ID NO: 14189 - DNA, 80 bp, synthetic construct
  misc_feature 1..80: note = Synthetic: >Beluga-cand-7780-7859
  source 1..80: mol_type = other DNA
ctgaaagactttattgttacggtggtagtaatgatgccatagatgcattgccctttactgctattcaacctcatgttgtt

SEQ ID NO: 14190 - DNA, 80 bp, synthetic construct
  misc_feature 1..80: note = Synthetic: >Beluga-cand-7860-7939
  source 1..80: mol_type = other DNA
tataatgatgctgtaggcgttggtaagcttgtagtacctgaacaacttttatataagccttatattgtgtatacacaagc

SEQ ID NO: 14191 - DNA, 80 bp, synthetic construct
  misc_feature 1..80: note = Synthetic: >Beluga-cand-7940-8019
  source 1..80: mol_type = other DNA
tcgtgaatattgtcgcgcgggtgtttgtgagcaagctaaggaaggttattgtattaattttaatggtgagtgggcattgt

SEQ ID NO: 14192 - DNA, 80 bp, synthetic construct
  misc_feature 1..80: note = Synthetic: >Beluga-cand-8020-8099
  source 1..80: mol_type = other DNA
ttaaccagcattacacatctaaggatggcgtgtattgtggtgaaacaccaatgagtgttgttatgagcattattaatgct

SEQ ID NO: 14193 - DNA, 80 bp, synthetic construct
  misc_feature 1..80: note = Synthetic: >Beluga-cand-8100-8179
  source 1..80: mol_type = other DNA
tatatttatcagggaaccaccaccagtttctttaatcgcttttgtgttttgagtgtaatgatgctcttagcactaatagc

SEQ ID NO: 14194 - DNA, 80 bp, synthetic construct
  misc_feature 1..80: note = Synthetic: >Beluga-cand-8180-8259
  source 1..80: mol_type = other DNA
gcttgtttatgtagttaaattccaagcatttttcaagacttatgcaggtcttgcatgtgctattttattgagctggggat

SEQ ID NO: 14195 - DNA, 80 bp, synthetic construct
  misc_feature 1..80: note = Synthetic: >Beluga-cand-8260-8339
  source 1..80: mol_type = other DNA
ttaatgctattatgcttttgtcttatagtgtgaatccaattgttgttatgcctttaatagtagtgtatatgtatgtggcc

SEQ ID NO: 14196 - DNA, 80 bp, synthetic construct
  misc_feature 1..80: note = Synthetic: >Beluga-cand-8340-8419
  source 1..80: mol_type = other DNA
ttaacggttacaactcccactgctatgataatgcatgttgcttttcttgtaacaattgtacctatgttaccttatagcct

SEQ ID NO: 14197 - DNA, 80 bp, synthetic construct
  misc_feature 1..80: note = Synthetic: >Beluga-cand-8420-8499
  source 1..80: mol_type = other DNA
tatggctatttatggtgcttatgtactattgatgtatactagtgtggcttgttggtttgttaagaccaaagtgtcctcag

SEQ ID NO: 14198 - DNA, 80 bp, synthetic construct
  misc_feature 1..80: note = Synthetic: >Beluga-cand-8500-8579
  source 1..80: mol_type = other DNA
gaaagttgtttgaaaagggtgaatttgttgcagattttgatactgcagcacgttcaacctttttgattaataatagcgtg

SEQ ID NO: 14199 - DNA, 80 bp, synthetic construct
  misc_feature 1..80: note = Synthetic: >Beluga-cand-8580-8659
  source 1..80: mol_type = other DNA
tacgtcaagcttgtaaatgaggtaggcgacaaatttcaaaagtatctttctggttatgctaggctgaagtattattcagg

SEQ ID NO: 14200 - DNA, 80 bp, synthetic construct
  misc_feature 1..80: note = Synthetic: >Beluga-cand-8660-8739
  source 1..80: mol_type = other DNA
ttctggtggtgaccaggagtgcttagatgcatgcagagcaacattagctaatgctcttgagaattttaagaacacacaag

SEQ ID NO: 14201 - DNA, 80 bp, synthetic construct
  misc_feature 1..80: note = Synthetic: >BetaSp-cand-18450-18529
  source 1..80: mol_type = other DNA
ccatcctgctcatgctccgtcatttgttgcagtagatgaaaagtacaaagtaagtggtgatttggccgtttgcttggata

SEQ ID NO: 14202 - DNA, 80 bp, synthetic construct
  misc_feature 1..80: note = Synthetic: >BetaSp-cand-18610-18689
  source 1..80: mol_type = other DNA
aaattgtttataacaaaagaagaagctgtcaaacgtgtgcgagcttgggtaggctttgatgcggaaggtgctcatgccac

SEQ ID NO: 14203 - DNA, 80 bp, synthetic construct
  misc_feature 1..80: note = Synthetic: >BetaSp-cand-18690-18769
  source 1..80: mol_type = other DNA
acgtgacaacattgggactaatctcccattacagttaggcttttcaacaggaattgattttgttgttgaggccgttggtt

SEQ ID NO: 14204 - DNA, 80 bp, synthetic construct
  misc_feature 1..80: note = Synthetic: >BetaSp-cand-19170-19249
  source 1..80: mol_type = other DNA
tgacatgtattgtagcgttcataagggagctcatgttgcctcttcagacgctataatgactcggtgtttagccgtgtatg

SEQ ID NO: 14205 - DNA, 80 bp, synthetic construct
  misc_feature 1..80: note = Synthetic: >BetaSp-cand-20690-20769
  source 1..80: mol_type = other DNA
ttgtccagctggaagatgaattgtttattcagaagtatggtttggaggactatgcttttgaacatattgtttatggaagt

SEQ ID NO: 14206 - DNA, 80 bp, synthetic construct
  misc_feature 1..80: note = Synthetic: >BetaSp-cand-21570-21649
  source 1..80: mol_type = other DNA
gttggctctaggaggctcagttgccataaaaattacagagttttcgtggaacgcagaattatatagtttaatggggaagt

SEQ ID NO: 14207 - DNA, 80 bp, synthetic construct
  misc_feature 1..80: note = Synthetic: >BetaSp-cand-21730-21809
  source 1..80: mol_type = other DNA
aagtccaaggttgaaattgatggaaatgttatgcatgccaactatttgttttggagaaatagtcagatgtggaatggagg

SEQ ID NO: 14208 - DNA, 80 bp, synthetic construct
  misc_feature 1..80: note = Synthetic: >BtCoV_008_16-cand-26010-26089
  source 1..80: mol_type = other DNA
cgccaagccttacaccacgattgtctatcagcgtgtgggacgctcagtgaatgcaacgtccagcactgggtgggctttct

SEQ ID NO: 14209 - DNA, 80 bp, synthetic construct
  misc_feature 1..80: note = Synthetic: >BtCoV_008_16-cand-26090-26169
  source 1..80: mol_type = other DNA
atgtcaaggccaagaatggcgattattcagccgtgaataatccgaccgaagttgttacagatggtgagaaaattttacat

SEQ ID NO: 14210 - DNA, 80 bp, synthetic construct
  misc_feature 1..80: note = Synthetic: >BtCoV_008_16-cand-26170-26249
  source 1..80: mol_type = other DNA
ttaatctaaacagaaatatggcttctgtgaaattccagccccggggccgcaatgggagaattccattctctctttatgcc

SEQ ID NO: 14211 - DNA, 80 bp, synthetic construct
  misc_feature 1..80: note = Synthetic: >BtCoV_008_16-cand-26250-26329
  source 1..80: mol_type = other DNA
cctcttagggttactgatgaaaaacctctttttaaggtgcttgcaaatgatgctgtgccacaaggttatcctggagtcac

SEQ ID NO: 14212 - DNA, 80 bp, synthetic construct
  misc_feature 1..80: note = Synthetic: >BtCoV_008_16-cand-26330-26409
  source 1..80: mol_type = other DNA
caaggatcaacaaattggctactggaatgaacaacctcgatggaggatgcgccgaggtgaacgtgtagaattgccaagca

SEQ ID NO: 14213 - DNA, 80 bp, synthetic construct
  misc_feature 1..80: note = Synthetic: >BtCoV_008_16-cand-26410-26489
  source 1..80: mol_type = other DNA
attggcatttctactaccatggtacaggcccacatgccgatgttccatataggaagcgaacaccaggcgtattttgggtt

SEQ ID NO: 14214 - DNA, 80 bp, synthetic construct
  misc_feature 1..80: note = Synthetic: >BtCoV_008_16-cand-26490-26569
  source 1..80: mol_type = other DNA
gctcatggtggtgctaaggcatccgctactggtctacctacaagaaaatccagtgagaaacctattgaacccgaatttaa

SEQ ID NO: 14215 - DNA, 80 bp, synthetic construct
  misc_feature 1..80: note = Synthetic: >BtCoV_008_16-cand-26570-26649
  source 1..80: mol_type = other DNA
gactgatctccccaacaacattgagattgttgaaccgactactcctcaggcttctcgtcctaattcacgtagtcgtagtc

SEQ ID NO: 14216 - DNA, 80 bp, synthetic construct
  misc_feature 1..80: note = Synthetic: >BtCoV_008_16-cand-26650-26729
  source 1..80: mol_type = other DNA
gtggacctcagtcacgggatcaaagttcttccaggaatgactcccaaaacaggaacaaatctcagtttcgtaattccaac

SEQ ID NO: 14217 - DNA, 80 bp, synthetic construct
  misc_feature 1..80: note = Synthetic: >BtCoV_008_16-cand-26730-26809
  source 1..80: mol_type = other DNA
aagcaaaaccagaatcagtctcgcaatcagtccaagagccgaaaccagtctagtgaccggtcaaactctaaggaagatct

SEQ ID NO: 14218 - DNA, 80 bp, synthetic construct
  misc_feature 1..80: note = Synthetic: >BtCoV_008_16-cand-26810-26889
  source 1..80: mol_type = other DNA
gattgatgctgtcaaggaagcactcaagtcactcggtatcggtcaaaatcatcctcaaaaacggcagaatgacaatcaga

SEQ ID NO: 14219 - DNA, 80 bp, synthetic construct
  misc_feature 1..80: note = Synthetic: >BtCoV_008_16-cand-26890-26969
  source 1..80: mol_type = other DNA
gtggcagtcgtactcctaaaaacaagtccaggtccaactctaagcagagggatcctgacaataaaccagaatggcgtaag

SEQ ID NO: 14220 - DNA, 80 bp, synthetic construct
  misc_feature 1..80: note = Synthetic: >BtCoV_008_16-cand-26970-27049
  source 1..80: mol_type = other DNA
acgcctactgacaatattgaggcttgtttcggacccagaggaggcttccgtaattttggtgacagcgagatgatgcagaa

SEQ ID NO: 14221 - DNA, 80 bp, synthetic construct
  misc_feature 1..80: note = Synthetic: >BtCoV_008_16-cand-27050-27129
  source 1..80: mol_type = other DNA
aggtgttaatgcatctggttatgctcaaattgccagcttgacacccagttcagctgccatcttgtttggtggtaatgttc

SEQ ID NO: 14222 - DNA, 80 bp, synthetic construct
  misc_feature 1..80: note = Synthetic: >BtCoV_008_16-cand-27130-27209
  source 1..80: mol_type = other DNA
agacacgccagcttgctgacgaggttgaaattacctatacgtacaagatgaatgttcctaaagataacccagctctggca

SEQ ID NO: 14223 - DNA, 80 bp, synthetic construct
  misc_feature 1..80: note = Synthetic: >BtCoV_008_16-cand-27210-27289
  source 1..80: mol_type = other DNA
ctgtttattgaacaggtcgatgcttacaaaaatggcactccaaaagagcagcgcgtgaagaaacagaaacgttccaagtc

SEQ ID NO: 14224 - DNA, 80 bp, synthetic construct
  misc_feature 1..80: note = Synthetic: >Delta-cand-19310-19389
  source 1..80: mol_type = other DNA
attacactaacaggcatacccgttcactgccaactacacagctgttatctggtttaggcgtaaccgccaccagaaatttc

SEQ ID NO: 14225 - DNA, 80 bp, synthetic construct
  misc_feature 1..80: note = Synthetic: >Delta-cand-19390-19469
  source 1..80: mol_type = other DNA
actgtgtggttcgacaatgatacaattttccaatacactattaatgtatctacgtatactgacatcgaccctagtaccca

SEQ ID NO: 14226 - DNA, 80 bp, synthetic construct
  misc_feature 1..80: note = Synthetic: >Delta-cand-19470-19549
  source 1..80: mol_type = other DNA
tgttgtcctctgtgatgataggtacggaacagattggagtcagtttaaccaacttcctaatgcagtattcctcaccaaaa

SEQ ID NO: 14227 - DNA, 80 bp, synthetic construct
  misc_feature 1..80: note = Synthetic: >Delta-cand-19550-19629
  source 1..80: mol_type = other DNA
ctaaggtgaagaaaacagaaccgtttccgtttgtacagcactgaccctaaatggctctcgccattgacggtgaagagcta

SEQ ID NO: 14228 - DNA, 80 bp, synthetic construct
  misc_feature 1..80: note = Synthetic: >Delta-cand-19630-19709
  source 1..80: mol_type = other DNA
tacatctatgtacgctataacaatcaactgaccacatttgcagatactacttgtacacagggtagaaatgttgagcagtt

SEQ ID NO: 14229 - DNA, 80 bp, synthetic construct
  misc_feature 1..80: note = Synthetic: >Delta-cand-19710-19789
  source 1..80: mol_type = other DNA
tatacctaaaacacctatggaaagagacttccttgagatgtctcaacagtccttcatccagcaatatcaattgcaggaac

SEQ ID NO: 14230 - DNA, 80 bp, synthetic construct
  misc_feature 1..80: note = Synthetic: >Delta-cand-19790-19869
  source 1..80: mol_type = other DNA
tgggtgttgaacacattatctatggtgatgattccagtccagtcattggcggaactcacacacttatctcactagttaaa

SEQ ID NO: 14231 - DNA, 80 bp, synthetic construct
  misc_feature 1..80: note = Synthetic: >Delta-cand-19870-19949
  source 1..80: mol_type = other DNA
aacaagtttgaacatcagcttgtcaaccatgtttacaacccagtccagaactgtgttgttacctcacctaacgcaagctc

SEQ ID NO: 14232 - DNA, 80 bp, synthetic construct
  misc_feature 1..80: note = Synthetic: >Delta-cand-19950-20029
  source 1..80: mol_type = other DNA
caagaacgtttgcactgttcttgatgttcttcttgatgactacattgacatcataagacaagcacatgccagttacacaa

SEQ ID NO: 14233 - DNA, 80 bp, synthetic construct
  misc_feature 1..80: note = Synthetic: >Delta-cand-20030-20109
  source 1..80: mol_type = other DNA
gtaaatccaaagtattcactgtgtcaattgacaaccaacaaattagattcatgctttggcatgatggccagcaagtcaag

SEQ ID NO: 14234 - DNA, 80 bp, synthetic construct
  misc_feature 1..80: note = Synthetic: >Delta-cand-20110-20189
  source 1..80: mol_type = other DNA
acttgctacccaatcttacagtcacttaccaatggttaccagatgccatctgtgtacaaaacattggttactgacttaca

SEQ ID NO: 14235 - DNA, 80 bp, synthetic construct
  misc_feature 1..80: note = Synthetic: >Delta-cand-20190-20269
  source 1..80: mol_type = other DNA
accagctgacatccctaattatcattcctacaccccccgggtgcctggagtagttaagaatgttatcaagtaccgccaac

SEQ ID NO: 14236 - DNA, 80 bp, synthetic construct
  misc_feature 1..80: note = Synthetic: >Delta-cand-20270-20349
  source 1..80: mol_type = other DNA
ttttcaactacatagttaaaaaggataggttggcagtaccacacaatatgaccgtattacaccttggagctgcatctgca

SEQ ID NO: 14237 - DNA, 80 bp, synthetic construct
  misc_feature 1..80: note = Synthetic: >Delta-cand-20350-20429
  source 1..80: mol_type = other DNA
ctaggtacagcaccaggttcttcagtcataaaacaaatgtttcctgaaggaactgttcttattgacctcgatataagaga

SEQ ID NO: 14238 - DNA, 80 bp, synthetic construct
  misc_feature 1..80: note = Synthetic: >Delta-cand-20430-20509
  source 1..80: mol_type = other DNA
gttcacttcagatgctaaccaaataatagttacagactacagaacttacataccaccacaccacgtagacgtcatatttt

SEQ ID NO: 14239 - DNA, 80 bp, synthetic construct
  misc_feature 1..80: note = Synthetic: >Delta-cand-20510-20589
  source 1..80: mol_type = other DNA
ctgacctctactgttgtgatgacatacacttctttgacaatctaataaggatagttaaggagaggctcgccctcggtggt

SEQ ID NO: 14240 - DNA, 80 bp, synthetic construct
  misc_feature 1..80: note = Synthetic: >Delta-cand-23150-23229
  source 1..80: mol_type = other DNA
ccactggcaaaacccttcaggtcttaccgtgtgaaaccccttctcaactgattgtgataaacaacaccgttgtcggtgct

SEQ ID NO: 14241 - DNA, 80 bp, synthetic construct
  misc_feature 1..80: note = Synthetic: >Delta-cand-23230-23309
  source 1..80: mol_type = other DNA
atcacatccaagccctcgcaggagtaattcaactgaaaataataccttctctggttttactactactattgtcacaccta

SEQ ID NO: 14242 - DNA, 80 bp, synthetic construct
  misc_feature 1..80: note = Synthetic: >Delta-cand-23310-23389
  source 1..80: mol_type = other DNA
ctttcttttattccacaaatgccaccactttcaactgttttgctatgtatatggaacctctcaattctcaacaaaatggc

SEQ ID NO: 14243 - DNA, 80 bp, synthetic construct
  misc_feature 1..80: note = Synthetic: >Delta-cand-23390-23469
  source 1..80: mol_type = other DNA
actaagcctgttttgtcctatggacctatcagcgtgtgtagtgatggtgcaattgtgggggtcaacatccacattacaga

SEQ ID NO: 14244 - DNA, 80 bp, synthetic construct
  misc_feature 1..80: note = Synthetic: >Delta-cand-23470-23549
  source 1..80: mol_type = other DNA
atactcgaccatccatgatgtacacgctgtagtttcactatacgatggcgaagttgaaataccatctgcattttctcttt

SEQ ID NO: 14245 - DNA, 80 bp, synthetic construct
  misc_feature 1..80: note = Synthetic: >Delta-cand-23550-23629
  source 1..80: mol_type = other DNA
ctgttcagacggagtacttgcaagttcaagcagagcaagttatagttgattgtcctcagtatgtatgcaatggcaacagc

SEQ ID NO: 14246 - DNA, 80 bp, synthetic construct
  misc_feature 1..80: note = Synthetic: >Delta-cand-23630-23709
  source 1..80: mol_type = other DNA
cgttgtctacaattactggcacaatacacctcagcttgctctaacattgaagcagctctgcattcctctgcacagttgga

SEQ ID NO: 14247 - DNA, 80 bp, synthetic construct
  misc_feature 1..80: note = Synthetic: >Delta-cand-23710-23789
  source 1..80: mol_type = other DNA
tagcagagagattataaataatgtttcaaacatcaacacagtccttgcagttagctaatattaccaacttcaagggtgac

SEQ ID NO: 14248 - DNA, 80 bp, synthetic construct
  misc_feature 1..80: note = Synthetic: >Delta-cand-23790-23869
  source 1..80: mol_type = other DNA
gatatcaaatacaattttagcagcatactaaccaccagaattggtactcaaggcagatctgctattgaagaccttctttt

SEQ ID NO: 14249 - DNA, 80 bp, synthetic construct
  misc_feature 1..80: note = Synthetic: >Delta-cand-23870-23949
  source 1..80: mol_type = other DNA
taataaagttgttactagtggccttggcactgttgatcaggactacaaatcctgctctagagacatggccatcgctgact

SEQ ID NO: 14250 - DNA, 80 bp, synthetic construct
  misc_feature 1..80: note = Synthetic: >Delta-cand-23950-24029
  source 1..80: mol_type = other DNA
tagtttgttcccagtattacaatggcatcatggttctacctggtgttgttgatgctgagaaaatggcaatgtatactggc

SEQ ID NO: 14251 - DNA, 80 bp, synthetic construct
  misc_feature 1..80: note = Synthetic: >Delta-cand-24030-24109
  source 1..80: mol_type = other DNA
tctcttactggagctatggtatttggaggactgactgccgcagcggcaataccatttgccacggcagtacaagctcgcct

SEQ ID NO: 14252 - DNA, 80 bp, synthetic construct
  misc_feature 1..80: note = Synthetic: >Delta-cand-24110-24189
  source 1..80: mol_type = other DNA
caattatgtcgcactgcaaacaaatgtactacaagaaaaccagaaaattcttgcagaatcatttaaccaagcagttggca

SEQ ID NO: 14253 - DNA, 80 bp, synthetic construct
  misc_feature 1..80: note = Synthetic: >Delta-cand-24190-24269
  source 1..80: mol_type = other DNA
atatatcacttgcactatcttctgttaatgatgccatccagcaaacttctgaggctcttaacaccgtagctattgctatt

SEQ ID NO: 14254 - DNA, 80 bp, synthetic construct
  misc_feature 1..80: note = Synthetic: >Delta-cand-24270-24349
  source 1..80: mol_type = other DNA
aaaaagattcaaacagttgttaaccagcagggcgaggcattatcacacctgactgcacagctgtcaaacaattttcaagc

SEQ ID NO: 14255 - DNA, 80 bp, synthetic construct
  misc_feature 1..80: note = Synthetic: >Delta-cand-24350-24429
  source 1..80: mol_type = other DNA
aatttcgacttctattcaagacatttacaaccgtcttgaggaagtagaggctaaccagcaagttgaccgtctcatcacag

SEQ ID NO: 14256 - DNA, 80 bp, synthetic construct
  misc_feature 1..80: note = Synthetic: >HKU1-cand-21190-21269
  source 1..80: mol_type = other DNA
gtatttgaatactacaacattagctgttcctgttaatatgcgtgttttacatttaggtgcagggtctgataaagaagtag

SEQ ID NO: 14257 - DNA, 80 bp, synthetic construct
  misc_feature 1..80: note = Synthetic: >HKU1-cand-21270-21349
  source 1..80: mol_type = other DNA
ctccaggttctgctgttttaagacagtggttaccatctggtagtattcttgtagataatgatttaaacccatttgttagc

SEQ ID NO: 14258 - DNA, 80 bp, synthetic construct
  misc_feature 1..80: note = Synthetic: >HKU1-cand-21350-21429
  source 1..80: mol_type = other DNA
gatagtttagttacttattttggagattgtatgactttaccatttgattgtcattgggatttgataatatctgatatgta

SEQ ID NO: 14259 - DNA, 80 bp, synthetic construct
  misc_feature 1..80: note = Synthetic: >HKU1-cand-21430-21509
  source 1..80: mol_type = other DNA
tgatcctcttactaaaaatattggtgattataatgtgagtaaggatggtttttttacttacatttgtcatttaattcgtg

SEQ ID NO: 14260 - DNA, 80 bp, synthetic construct
  misc_feature 1..80: note = Synthetic: >HKU1-cand-21510-21589
  source 1..80: mol_type = other DNA
ataaattatctttgggtggtagtgtagctataaaaattacagagttttcttggaatgctgatttatataaattaatgagt

SEQ ID NO: 14261 - DNA, 80 bp, synthetic construct
  misc_feature 1..80: note = Synthetic: >HKU1-cand-21590-21669
  source 1..80: mol_type = other DNA
tgttttgcattttggacagttttttgtactaatgtaaatgcttcttctagtgaagggtttttaataggtataaattacct

SEQ ID NO: 14262 - DNA, 80 bp, synthetic construct
  misc_feature 1..80: note = Synthetic: >HKU1-cand-21670-21749
  source 1..80: mol_type = other DNA
gggtaaatcttcttttgaaatagatggcaatgttatgcatgctaactatttgttttggagaaatagtacaacatggaatg

SEQ ID NO: 14263 - DNA, 80 bp, synthetic construct
  misc_feature 1..80: note = Synthetic: >HKU1-cand-21750-21829
  source 1..80: mol_type = other DNA
gcggtgcttatagtttatttgatatgactaaattttctttgaaattggctggcactgctgttgttaatttaagaccagat

SEQ ID NO: 14264 - DNA, 80 bp, synthetic construct
  misc_feature 1..80: note = Synthetic: >HKU1-cand-21830-21909
  source 1..80: mol_type = other DNA
caattaaatgatttagtttattctcttattgaaagaggtaaattattagttcgcgatacgcgtaaagagatttttgttgg

SEQ ID NO: 14265 - DNA, 80 bp, synthetic construct
  misc_feature 1..80: note = Synthetic: >HKU1-cand-21910-21989
  source 1..80: mol_type = other DNA
tgatagtcttgtaaatacttgttagatctttcagtttgttaacattaaatctaaactatgttaattatttttttattttt

SEQ ID NO: 14266 - DNA, 80 bp, synthetic construct
  misc_feature 1..80: note = Synthetic: >HKU1-cand-21990-22069
  source 1..80: mol_type = other DNA
ttatttctgttatggttttaatgaacctcttaatgttgtgtctcatttaaaccatgactggtttttatttggtgatagtc

SEQ ID NO: 14267 - DNA, 80 bp, synthetic construct
  misc_feature 1..80: note = Synthetic: >HKU1-cand-22070-22149
  source 1..80: mol_type = other DNA
gttctgattgtaaccatattaataatttaaaaattaaaaattttgattatttggatattcaccctagtttgtgcaacaat

SEQ ID NO: 14268 - DNA, 80 bp, synthetic construct
  misc_feature 1..80: note = Synthetic: >HKU1-cand-22150-22229
  source 1..80: mol_type = other DNA
ggtaagatttcatctagtgccggtgattctatttttaagagttttcatttcactcgattttataattacactggcgaagg

SEQ ID NO: 14269 - DNA, 80 bp, synthetic construct
  misc_feature 1..80: note = Synthetic: >HKU1-cand-22230-22309
  source 1..80: mol_type = other DNA
tgatcaaattattttttatgagggtgttaattttaatccttatcatagatttaagtgttttcctaatggtagtaatgatg

SEQ ID NO: 14270 - DNA, 80 bp, synthetic construct
  misc_feature 1..80: note = Synthetic: >HKU1-cand-22310-22389
  source 1..80: mol_type = other DNA
tatggcttcttaacaaggtaagattttatcgtgccttatattctaatatggccttttttcgttatcttacttttgttgat

SEQ ID NO: 14271 - DNA, 80 bp, synthetic construct
  misc_feature 1..80: note = Synthetic: >HKU1-cand-22390-22469
  source 1..80: mol_type = other DNA
attccttataatgtttctctttctattaagtttaattcttgtaaaagtgatattttatcacttaacaatcctatttttat

SEQ ID NO: 14272 - DNA, 80 bp, synthetic construct
  misc_feature 1..80: note = Synthetic: >HKU15-cand-6480-6559
  source 1..80: mol_type = other DNA
tgggaatattgcaacacagcccttgactcgcatcaaagctggtgcacctcccatgcgtcaaaaaattttatgtgttatcc

SEQ ID NO: 14273 - DNA, 80 bp, synthetic construct
  misc_feature 1..80: note = Synthetic: >HKU15-cand-6560-6639
  source 1..80: mol_type = other DNA
tggcacttgctattgtgtactttgctgctatggcttttggctttttggcaagtcaaattacgcttaatacagtgcctacg

SEQ ID NO: 14274 - DNA, 80 bp, synthetic construct
  misc_feature 1..80: note = Synthetic: >HKU15-cand-6880-6959
  source 1..80: mol_type = other DNA
tatgaacagtctctttatgaaacccatcagcgtcagtctatggttagggatgcgttgtcactcaagacagcaaatctctt

SEQ ID NO: 14275 - DNA, 80 bp, synthetic construct
  misc_feature 1..80: note = Synthetic: >HKU15-cand-6960-7039
  source 1..80: mol_type = other DNA
taacctaggcaagcgtgttgtagtaggatacactcaacatgaagttgttgtgggtacctcctattttaattctcctgcac

SEQ ID NO: 14276 - DNA, 80 bp, synthetic construct
  misc_feature 1..80: note = Synthetic: >HKU15-cand-7040-7119
  source 1..80: mol_type = other DNA
tttttaatgcaaagtgcaccttcttacagtatcaggacactagacaactctattgctatgatactgttcctactgaacat

SEQ ID NO: 14277 - DNA, 80 bp, synthetic construct
  misc_feature 1..80: note = Synthetic: >HKU15-cand-7200-7279
  source 1..80: mol_type = other DNA
agagcagataatgttctatccacatattgtgcgctatactagcaattcctattgccgtatggggcattgttttaatacta

SEQ ID NO: 14278 - DNA, 80 bp, synthetic construct
  misc_feature 1..80: note = Synthetic: >HKU15-cand-7280-7359
  source 1..80: mol_type = other DNA
accctggtatttgcatttcatttacggacgaatttccgtatagtgaaaatgtcaaacctggtgtgtactgtgctgatacc

SEQ ID NO: 14279 - DNA, 80 bp, synthetic construct
  misc_feature 1..80: note = Synthetic: >HKU15-cand-7360-7439
  source 1..80: mol_type = other DNA
tctttgcagttgttttcaaacctcgttttgggcactgtatctggtattcacatctttacatcaacagctgcattgcttgg

SEQ ID NO: 14280 - DNA, 80 bp, synthetic construct
  misc_feature 1..80: note = Synthetic: >HKU15-cand-7440-7519
  source 1..80: mol_type = other DNA
atctactattgtgatcatactatgcgttgttgctgttcttgcagttcagcgattcttcaaggagtacacaacttttgtta

SEQ ID NO: 14281 - DNA, 80 bp, synthetic construct
  misc_feature 1..80: note = Synthetic: >HKU15-cand-7520-7599
  source 1..80: mol_type = other DNA
tgtacacttgtggtcttgctcttgtcaacattgtgggcattgcacttatgtacaagtgccttgtcttcgcgattttctat

SEQ ID NO: 14282 - DNA, 80 bp, synthetic construct
  misc_feature 1..80: note = Synthetic: >HKU15-cand-7600-7679
  source 1..80: mol_type = other DNA
tatgcaatctacctttactttgtccttactttcccctcctttaagaggaatgtggcattgttttacttcgctgtagtgat

SEQ ID NO: 14283 - DNA, 80 bp, synthetic construct
  misc_feature 1..80: note = Synthetic: >HKU15-cand-7680-7759
  source 1..80: mol_type = other DNA
cgtgccgcacgtgagtaacatgcaattgcttgcgctcattgtgtgtagcattatctactttctctacacctatgttcata

SEQ ID NO: 14284 - DNA, 80 bp, synthetic construct
  misc_feature 1..80: note = Synthetic: >HKU2-cand-4180-4259
  source 1..80: mol_type = other DNA
tatagatcatcacactggtggcaagttgcaaaagctttccacttcttttgttaaaaggaacggtaaggttgcaactggtg

SEQ ID NO: 14285 - DNA, 80 bp, synthetic construct
  misc_feature 1..80: note = Synthetic: >HKU2-cand-4260-4339
  source 1..80: mol_type = other DNA
agtgtgttatgattgatactggcaagttaaaagtccttaatgcagttggtccccgtaagggcaaggatgcagagtcttta

SEQ ID NO: 14286 - DNA, 80 bp, synthetic construct
  misc_feature 1..80: note = Synthetic: >HKU2-cand-4340-4419
  source 1..80: mol_type = other DNA
ttaaatactgtttacactaatatctttgcgcgtaagggtgttccccttatgcctttgattagttgtggtatttttggctt

SEQ ID NO: 14287 - DNA, 80 bp, synthetic construct
  misc_feature 1..80: note = Synthetic: >HKU2-cand-4420-4499
  source 1..80: mol_type = other DNA
tgacattaaagactcacttagggcattcttggatgcatgtggtgataggcacgttaaatgctttgtttattctgactctg

SEQ ID NO: 14288 - DNA, 80 bp, synthetic construct
  misc_feature 1..80: note = Synthetic: >HKU2-cand-4500-4579
  source 1..80: mol_type = other DNA
aaagggagtcagttatgaagttcttgacgacaccttttgaggaacatgttgcacctattgaagaaatgcttgaaacacct

SEQ ID NO: 14289 - DNA, 80 bp, synthetic construct
  misc_feature 1..80: note = Synthetic: >HKU2-cand-4580-4659
  source 1..80: mol_type = other DNA
gtggttgaggaaacaacaactgatgttgtttctccatttcacactattggttctcataagttttatgattgcaatagtgt

SEQ ID NO: 14290 - DNA, 80 bp, synthetic construct
  misc_feature 1..80: note = Synthetic: >HKU2-cand-4660-4739
  source 1..80: mol_type = other DNA
tgagcctattttaggtctaggtgttaagaacattgttctcttcacagaccaggtgttgtctgttaaagatttcggtattg

SEQ ID NO: 14291 - DNA, 80 bp, synthetic construct
  misc_feature 1..80: note = Synthetic: >HKU2-cand-4740-4819
  source 1..80: mol_type = other DNA
ttgttgataagtatctcaatggcttgttatctgacatgtccaacaagtatgttaatgatcataaagctgttccttttggt

SEQ ID NO: 14292 - DNA, 80 bp, synthetic construct
  misc_feature 1..80: note = Synthetic: >HKU2-cand-4820-4899
  source 1..80: mol_type = other DNA
aacattttgtcacttgattgtggtgcttttactgtagtggatgctgtgtcgccttttgatggtgctagctttgagaagca

SEQ ID NO: 14293 - DNA, 80 bp, synthetic construct
  misc_feature 1..80: note = Synthetic: >HKU2-cand-4900-4979
  source 1..80: mol_type = other DNA
gagtggtcgtaccatacgtaaattggctagattggatggcagcacattatgtgtcttacctaatgccattgcattatttg

SEQ ID NO: 14294 - DNA, 80 bp, synthetic construct
  misc_feature 1..80: note = Synthetic: >HKU2-cand-4980-5059
  source 1..80: mol_type = other DNA
acaagctctttgtgttgggtgacaatttttcatttttagtgttagataatgttagacctttgtttgataattatcttaaa

SEQ ID NO: 14295 - DNA, 80 bp, synthetic construct
  misc_feature 1..80: note = Synthetic: >HKU2-cand-5060-5139
  source 1..80: mol_type = other DNA
cctaaagatgttaaagttaaggtcacagcggatggtcgcaatatcaatgatgttatagtcacaactgcggaaacgtttga

SEQ ID NO: 14296 - DNA, 80 bp, synthetic construct
  misc_feature 1..80: note = Synthetic: >HKU2-cand-5140-5219
  source 1..80: mol_type = other DNA
tgcgcagttgggaccttctgctaatggtgctgaatcacttgttggtgttgttcctactccaacggatggtggtaaggttg

SEQ ID NO: 14297 - DNA, 80 bp, synthetic construct
  misc_feature 1..80: note = Synthetic: >HKU2-cand-5220-5299
  source 1..80: mol_type = other DNA
ttaatacagtacctgatgtcaattggagtaagcactttggtttttctgatgctgctgcatttgccgttcttgaccatagc

SEQ ID NO: 14298 - DNA, 80 bp, synthetic construct
  misc_feature 1..80: note = Synthetic: >HKU2-cand-5300-5379
  source 1..80: mol_type = other DNA
aagtttgcttttgattctgaagtagttgatggtaagcgtgcacttgctgattcagataacaattgctgggttaatgcgac

SEQ ID NO: 14299 - DNA, 80 bp, synthetic construct
  misc_feature 1..80: note = Synthetic: >HKU2-cand-5380-5459
  source 1..80: mol_type = other DNA
ttgtttagcattgcaatttcttaaacctacgtttaaatacgttggttgggaggatttgtggaacaagttcgttacaggtg

SEQ ID NO: 14300 - DNA, 80 bp, synthetic construct
  misc_feature 1..80: note = Synthetic: >HKU31-cand-24580-24659
  source 1..80: mol_type = other DNA
tgaatggtattggcatcactcaaaatgttcttatggagaaccagaaggagatagccaataagttcaaccaggcattaggt

SEQ ID NO: 14301 - DNA, 80 bp, synthetic construct
  misc_feature 1..80: note = Synthetic: >HKU31-cand-24660-24739
  source 1..80: mol_type = other DNA
gctatgcaaacaggattcacagctaccaatcaagcttttcagaaggttcaagatgttgtgaatgccaatgcacaagcatt

SEQ ID NO: 14302 - DNA, 80 bp, synthetic construct
  misc_feature 1..80: note = Synthetic: >HKU31-cand-24740-24819
  source 1..80: mol_type = other DNA
atctaaattagctagtgaattagctaatacattcggtgctatttccgcttctataggtgacatcttaaaacgcttggatg

SEQ ID NO: 14303 - DNA, 80 bp, synthetic construct
  misc_feature 1..80: note = Synthetic: >HKU31-cand-24820-24899
  source 1..80: mol_type = other DNA
ttttagaacaggaagtgcaaatagaccgccttattaacggacgtctgacatcgttgaatgcgtttgtaagtcagcaactg

SEQ ID NO: 14304 - DNA, 80 bp, synthetic construct
  misc_feature 1..80: note = Synthetic: >HKU31-cand-24900-24979
  source 1..80: mol_type = other DNA
gtgcggagtgaagctgctgctcgctcatcccagttagctaaagacaaaattaatgaatgtgttaaagcccaatctacacg

SEQ ID NO: 14305 - DNA, 80 bp, synthetic construct
  misc_feature 1..80: note = Synthetic: >HKU31-cand-24980-25059
  source 1..80: mol_type = other DNA
tagtgggttttgcggacaaggcactcatatagtgtcttttgttattaatgctcctaatggattttattttatacatgtgg

SEQ ID NO: 14306 - DNA, 80 bp, synthetic construct
  misc_feature 1..80: note = Synthetic: >HKU31-cand-25060-25139
  source 1..80: mol_type = other DNA
gttatcacccgcaggattatgtaaatcaaacagctgcttatggattgtgtgattcttcttctacaaaatgtatagccgct

SEQ ID NO: 14307 - DNA, 80 bp, synthetic construct
  misc_feature 1..80: note = Synthetic: >HKU31-cand-25140-25219
  source 1..80: mol_type = other DNA
aagaatggctattttgttaaaaatgattctgatagtgatagttggtcttatacaggcagtagtttttatcagcctgaacc

SEQ ID NO: 14308 - DNA, 80 bp, synthetic construct
  misc_feature 1..80: note = Synthetic: >HKU31-cand-25220-25299
  source 1..80: mol_type = other DNA
tatcactaattttaactcgcggtttgttgaacctgaggtaacatttcaaaatttaaccaataaccttccacctccacttc

SEQ ID NO: 14309 - DNA, 80 bp, synthetic construct
  misc_feature 1..80: note = Synthetic: >HKU31-cand-25300-25379
  source 1..80: mol_type = other DNA
taagtaataatactgatgttactttcgaggatgagctggaagagttttataaaaatattacgtctgagatacctaatttt

SEQ ID NO: 14310 - DNA, 80 bp, synthetic construct
  misc_feature 1..80: note = Synthetic: >HKU31-cand-25380-25459
  source 1..80: mol_type = other DNA
ggatctatcagacagattaataccactatgcttaacttgtctgaagaaatgagcactttacagcaagtggtaaaagattt

SEQ ID NO: 14311 - DNA, 80 bp, synthetic construct
  misc_feature 1..80: note = Synthetic: >HKU31-cand-25460-25539
  source 1..80: mol_type = other DNA
aaacaactcttatatagagcttaaagaattaggaaactacacatactatcaaaaatggccgtggtatgtgtggttaggtt

SEQ ID NO: 14312 - DNA, 80 bp, synthetic construct
  misc_feature 1..80: note = Synthetic: >HKU31-cand-25540-25619
  source 1..80: mol_type = other DNA
ttattgctggtcttgttgcactagcactatgtttatttttcatactgtgttgcacaggttgtggcactagttgtctggga

SEQ ID NO: 14313 - DNA, 80 bp, synthetic construct
  misc_feature 1..80: note = Synthetic: >HKU31-cand-25620-25699
  source 1..80: mol_type = other DNA
aaaataaattgtactcgttgttgtgataagtatgatgattttgacatccagccggagaaaatccacatacactaaaataa

SEQ ID NO: 14314 - DNA, 80 bp, synthetic construct
  misc_feature 1..80: note = Synthetic: >HKU31-cand-25700-25779
  source 1..80: mol_type = other DNA
cgaaccttaaaaatgcagtctaaaaggggaattttaattcttattgtctgcaacattttagcaatgagcttggctaaacc

SEQ ID NO: 14315 - DNA, 80 bp, synthetic construct
  misc_feature 1..80: note = Synthetic: >HKU31-cand-25780-25859
  source 1..80: mol_type = other DNA
ttttatacctgagcattgcgccaattatgaaggtgccatgttccaagcatgtgttcaaaatgctattagagctgcaactg

SEQ ID NO: 14316 - DNA, 80 bp, synthetic construct
  misc_feature 1..80: note = Synthetic: >HKU4-cand-18660-18739
  source 1..80: mol_type = other DNA
tctgatactttggataagttgtcagattactgtacgtttgtttgttgggctcatggttttgagctcacgtctgcgtctta

SEQ ID NO: 14317 - DNA, 80 bp, synthetic construct
  misc_feature 1..80: note = Synthetic: >HKU4-cand-18740-18819
  source 1..80: mol_type = other DNA
cttttgtaagattggtaaagaacagcggtgtagcatgtgtagtagacgtgcatctactttctcctcaccgttgcaatctt

SEQ ID NO: 14318 - DNA, 80 bp, synthetic construct
  misc_feature 1..80: note = Synthetic: >HKU4-cand-18820-18899
  source 1..80: mol_type = other DNA
atgcctgctggagtcattccagtggatatgattatgtttacaacccattttttgttgatgttcagcagtgggggtatgta

SEQ ID NO: 14319 - DNA, 80 bp, synthetic construct
  misc_feature 1..80: note = Synthetic: >HKU4-cand-18900-18979
  source 1..80: mol_type = other DNA
ggcaatttagctaccaaccacgaccggtattgtggcatccatgctggtgctcatgtagcatccagtgatgccataatgac

SEQ ID NO: 14320 - DNA, 80 bp, synthetic construct
  misc_feature 1..80: note = Synthetic: >HKU4-cand-18980-19059
  source 1..80: mol_type = other DNA
taggtgtttggcaatttatgattgttttatagaacgtgttgattgggatgttacgtatccttatatatcacatgaacaaa

SEQ ID NO: 14321 - DNA, 80 bp, synthetic construct
  misc_feature 1..80: note = Synthetic: >HKU4-cand-19060-19139
  source 1..80: mol_type = other DNA
aacttaattcttgctgtcgtacagtagagcgtaacgttgttcgctccgctgtgctctcaggcaagtttgaaaaaatttat

SEQ ID NO: 14322 - DNA, 80 bp, synthetic construct
  misc_feature 1..80: note = Synthetic: >HKU4-cand-19140-19219
  source 1..80: mol_type = other DNA
gatattggtaatcctaagggtattgccattatttctgaacctgtggagtggcatttctatgatgcacagcctcttagtaa

SEQ ID NO: 14323 - DNA, 80 bp, synthetic construct
  misc_feature 1..80: note = Synthetic: >HKU4-cand-19220-19299
  source 1..80: mol_type = other DNA
taaagttaagaaattgttttacacagatgatgtgtctaagcaatttgaagatgggctgtgtttgttttggaactgtaatg

SEQ ID NO: 14324 - DNA, 80 bp, synthetic construct
  misc_feature 1..80: note = Synthetic: >HKU4-cand-19300-19379
  source 1..80: mol_type = other DNA
tttcaaaataccctagtaatgctgttgtttgtcggtttgatactagagtgcattcagagtttaatttgcctggttgtaat

SEQ ID NO: 14325 - DNA, 80 bp, synthetic construct
  misc_feature 1..80: note = Synthetic: >HKU4-cand-19380-19459
  source 1..80: mol_type = other DNA
ggtggcagtttgtatgttaacaaacatgcctttcatacacctgcatatgacattaatgcatttagagatcttaaaccgtt

SEQ ID NO: 14326 - DNA, 80 bp, synthetic construct
  misc_feature 1..80: note = Synthetic: >HKU4-cand-19460-19539
  source 1..80: mol_type = other DNA
acctttcttttactattctactactccatgtgaagttcatggtagtggtaatatgttagaagatatagactatgtgccac

SEQ ID NO: 14327 - DNA, 80 bp, synthetic construct
  misc_feature 1..80: note = Synthetic: >HKU4-cand-19540-19619
  source 1..80: mol_type = other DNA
ttaaatctgctgtttgtataacagcttgtaatttaggtggagctgtttgtcgtaagcatgcagcagaataccgtgattat

SEQ ID NO: 14328 - DNA, 80 bp, synthetic construct
  misc_feature 1..80: note = Synthetic: >HKU4-cand-19620-19699
  source 1..80: mol_type = other DNA
atggaagcatataacattgtatcagctgcaggttttcgtctatgggtatataagacctttgatatctataatctttggtc

SEQ ID NO: 14329 - DNA, 80 bp, synthetic construct
  misc_feature 1..80: note = Synthetic: >HKU4-cand-19700-19779
  source 1..80: mol_type = other DNA
tacttttgttaaagttcaaggtttagaaaacattgcttttaatgttattaaacaaggccattttacaggtgttgatggtg

SEQ ID NO: 14330 - DNA, 80 bp, synthetic construct
  misc_feature 1..80: note = Synthetic: >HKU4-cand-19780-19859
  source 1..80: mol_type = other DNA
agttgcctgttgctgtagtcaacgacaagatcttcactaaaaatggtactgatgatgtgtgcatttttaagaatgaaact

SEQ ID NO: 14331 - DNA, 80 bp, synthetic construct
  misc_feature 1..80: note = Synthetic: >HKU4-cand-19860-19939
  source 1..80: mol_type = other DNA
gcacttcctacaaatgtagcatttgaattgtatgctaagagagctgttcgctctcatcctgatttgaatttgctacgtaa

SEQ ID NO: 14332 - DNA, 80 bp, synthetic construct
  misc_feature 1..80: note = Synthetic: >HKU4-cand-23770-23849
  source 1..80: mol_type = other DNA
tcactagtagttagtgattgtaaattgccattaggccagtcactttgtgcagtccctcctgtgtctacttttagaagtta

SEQ ID NO: 14333 - DNA, 80 bp, synthetic construct
  misc_feature 1..80: note = Synthetic: >HKU4-cand-23850-23929
  source 1..80: mol_type = other DNA
tagcgctagccaatttcagcttgctgtgcttaattatacttctcctattgttgttactcctattaattccagtggtttta

SEQ ID NO: 14334 - DNA, 80 bp, synthetic construct
  misc_feature 1..80: note = Synthetic: >HKU4-cand-23930-24009
  source 1..80: mol_type = other DNA
ccgctgcaattccaactaatttttctttttcagttacacaggagtacattgaaacatccattcagaaggttactgtagat

SEQ ID NO: 14335 - DNA, 80 bp, synthetic construct
  misc_feature 1..80: note = Synthetic: >HKU4-cand-24010-24089
  source 1..80: mol_type = other DNA
tgtaaacagtatgtctgtaatggttttactaggtgtgaaaagctattggttgaatatgggcaattttgttccaaaattaa

SEQ ID NO: 14336 - DNA, 80 bp, synthetic construct
  misc_feature 1..80: note = Synthetic: >HKU4-cand-24090-24169
  source 1..80: mol_type = other DNA
tcaagctttacatggtgctaatcttagacaagatgagtctgtttatagtctttatagtaacattaaaaccacctctaccc

SEQ ID NO: 14337 - DNA, 80 bp, synthetic construct
  misc_feature 1..80: note = Synthetic: >HKU4-cand-24170-24249
  source 1..80: mol_type = other DNA
aaactcttgagtatggtttaaatggtgattttaatcttacattattacaagtaccacaaattggaggttcttcctctagt

SEQ ID NO: 14338 - DNA, 80 bp, synthetic construct
  misc_feature 1..80: note = Synthetic: >HKU4-cand-24250-24329
  source 1..80: mol_type = other DNA
tatcgtagtgctattgaagacttattatttgataaggtaactattgcagatcccggttatatgcagggctatgatgattg

SEQ ID NO: 14339 - DNA, 80 bp, synthetic construct
  misc_feature 1..80: note = Synthetic: >HKU4-cand-24330-24409
  source 1..80: mol_type = other DNA
catgaaacaaggaccccagtctgctagagatcttatttgtgctcaatatgtgtctggttacaaagttttaccaccacttt

SEQ ID NO: 14340 - DNA, 80 bp, synthetic construct
  misc_feature 1..80: note = Synthetic: >HKU4-cand-24410-24489
  source 1..80: mol_type = other DNA
atgaccctaatatggaagctgcttacacatcttcactattaggtagtatagcaggtgctggatggacagctggtctttca

SEQ ID NO: 14341 - DNA, 80 bp, synthetic construct
  misc_feature 1..80: note = Synthetic: >HKU4-cand-24490-24569
  source 1..80: mol_type = other DNA
tcctttgccgctataccttttgcacaaagtatgttttataggttgaatggcgttggtattactcaacaagttctctctga

SEQ ID NO: 14342 - DNA, 80 bp, synthetic construct
  misc_feature 1..80: note = Synthetic: >HKU4-cand-24570-24649
  source 1..80: mol_type = other DNA
gaaccaaaagttgattgctaacaagtttaaccaagccttaggtgctatgcaaactggctttacaacatctaacctagctt

SEQ ID NO: 14343 - DNA, 80 bp, synthetic construct
  misc_feature 1..80: note = Synthetic: >HKU4-cand-24650-24729
  source 1..80: mol_type = other DNA
ttagcaaggttcaagatgctgtaaatgccaatgcacaagcactttctaagttagcatcagagttgtctaatacttttggt

SEQ ID NO: 14344 - DNA, 80 bp, synthetic construct
  misc_feature 1..80: note = Synthetic: >HKU4-cand-24730-24809
  source 1..80: mol_type = other DNA
gctatttcttcatctattagtgacatccttgctaggcttgacactgttgaacaggatgcgcaaattgatcgtttgatcaa

SEQ ID NO: 14345 - DNA, 80 bp, synthetic construct
  misc_feature 1..80: note = Synthetic: >HKU4-cand-24810-24889
  source 1..80: mol_type = other DNA
tggtcgcttaacttctcttaacgcatttgtttcacaacaacttgtgcgttctgaaactgctgctagatctgctcagttgg

SEQ ID NO: 14346 - DNA, 80 bp, synthetic construct
  misc_feature 1..80: note = Synthetic: >HKU4-cand-24890-24969
  source 1..80: mol_type = other DNA
ctagtgataaagtcaacgagtgtgtaaaatcacaatccaagagaaatgggttttgtgggtctggcactcatatagtatca

SEQ ID NO: 14347 - DNA, 80 bp, synthetic construct
  misc_feature 1..80: note = Synthetic: >HKU4-cand-24970-25049
  source 1..80: mol_type = other DNA
tttgttgttaatgctccaaatggtttttatttctttcatgttggttatgttccaacaaattatactaatgttacagctgc

SEQ ID NO: 14348 - DNA, 80 bp, synthetic construct
  misc_feature 1..80: note = Synthetic: >HKU4-cand-27590-27669
  source 1..80: mol_type = other DNA
agtttgtgatttttctttaggtggtaatgtttctactgtttttgtcccttctagtgataaaacagtaccccttcacataa

SEQ ID NO: 14349 - DNA, 80 bp, synthetic construct
  misc_feature 1..80: note = Synthetic: >HKU4-cand-27670-27749
  source 1..80: mol_type = other DNA
tcgcacctagcaagctttatgtctaagcttgtttaatgcttctatgggtcctatgtttagtctctgactaaccttggaca

SEQ ID NO: 14350 - DNA, 80 bp, synthetic construct
  misc_feature 1..80: note = Synthetic: >HKU4-cand-27750-27829
  source 1..80: mol_type = other DNA
tttggaaaacgaactatgttaccttttgtccatgaacaaataggtactatcatagtaaattttttcattttaaccgtagt

SEQ ID NO: 14351 - DNA, 80 bp, synthetic construct
  misc_feature 1..80: note = Synthetic: >HKU4-cand-27830-27909
  source 1..80: mol_type = other DNA
atgcgctattacattagtggtgtgtttagcaatccttacggctattagattatgtgtgcaatgtgcttcgggtgttaaca

SEQ ID NO: 14352 - DNA, 80 bp, synthetic construct
  misc_feature 1..80: note = Synthetic: >HKU4-cand-27910-27989
  source 1..80: mol_type = other DNA
ctcttttgtttgtacccgcgttctacatctataatactgggcgcaacgcctattttaagtttcaagagaatcgtccaccc

SEQ ID NO: 14353 - DNA, 80 bp, synthetic construct
  misc_feature 1..80: note = Synthetic: >HKU4-cand-27990-28069
  source 1..80: mol_type = other DNA
tttcctcctgaggactgggtttaacgaactctttaaatatgtcgtcgaacggtagtcttaccaaagatgaggtagtaaat

SEQ ID NO: 14354 - DNA, 80 bp, synthetic construct
  misc_feature 1..80: note = Synthetic: >HKU4-cand-28070-28149
  source 1..80: mol_type = other DNA
attattaaggactggaatttttcatggtccataatattcctacttattactatcgtactccaatatggttatccatctag

SEQ ID NO: 14355 - DNA, 80 bp, synthetic construct
  misc_feature 1..80: note = Synthetic: >HKU4-cand-28150-28229
  source 1..80: mol_type = other DNA
gagtatgatggtttacgtctttaagatgttcatattatggcttttatggccagcttctatggcactgtccatatttagtg

SEQ ID NO: 14356 - DNA, 80 bp, synthetic construct
  misc_feature 1..80: note = Synthetic: >HKU4-cand-28230-28309
  source 1..80: mol_type = other DNA
ctatttatcctattagtttatcatcccagattatatctggcattctagcagcaatctgtgctgttatgtggctagcgtac

SEQ ID NO: 14357 - DNA, 80 bp, synthetic construct
  misc_feature 1..80: note = Synthetic: >HKU4-cand-28310-28389
  source 1..80: mol_type = other DNA
tttgttcagagtataaggctatttatgcgcactggttcctggtggtcttttaatccagaatctaattgtctgctcaatgt

SEQ ID NO: 14358 - DNA, 80 bp, synthetic construct
  misc_feature 1..80: note = Synthetic: >HKU4-cand-28390-28469
  source 1..80: mol_type = other DNA
cccaatcggtggtacaacagttgttaggcccttggtcgaagattcgactagtgttactgctgttgtcaacgatggtcatc

SEQ ID NO: 14359 - DNA, 80 bp, synthetic construct
  misc_feature 1..80: note = Synthetic: >HKU4-cand-28470-28549
  source 1..80: mol_type = other DNA
ttaagatggctggtatgcactttggtcgctgtgactacgatagacttcctatggaaatcaccgtagccaagccctctgtg

SEQ ID NO: 14360 - DNA, 80 bp, synthetic construct
  misc_feature 1..80: note = Synthetic: >HKU4-cand-28550-28629
  source 1..80: mol_type = other DNA
cttatagcacttaagatggttaaacgccaatcatatggtacaaattctggtgttgccatattccataggtataaagctgg

SEQ ID NO: 14361 - DNA, 80 bp, synthetic construct
  misc_feature 1..80: note = Synthetic: >HKU4-cand-28630-28709
  source 1..80: mol_type = other DNA
taattatagaagacctactattatacaagatgaagaacttgcattgcttagggcatagtaagtgagattttaacgaatct

SEQ ID NO: 14362 - DNA, 80 bp, synthetic construct
  misc_feature 1..80: note = Synthetic: >HKU4-cand-28710-28789
  source 1..80: mol_type = other DNA
taataactcattgttatggcaactcctgctgcacctcgcaccattagttttgctgataataatgacaaccagcctaatca

SEQ ID NO: 14363 - DNA, 80 bp, synthetic construct
  misc_feature 1..80: note = Synthetic: >HKU4-cand-28790-28869
  source 1..80: mol_type = other DNA
gcagcagcgtggacgcggaagaaaccctaagccacgacctgctcccaataacactgtctcctggtacacagggctcaccc

SEQ ID NO: 14364 - DNA, 80 bp, synthetic construct
  misc_feature 1..80: note = Synthetic: >HKU9-cand-19360-19439
  source 1..80: mol_type = other DNA
aacaatacatgcttgcccactaatgtagcatttgagctgtgggcaaagcgttcagtaaatgtagtaccagaagttaagtt

SEQ ID NO: 14365 - DNA, 80 bp, synthetic construct
  misc_feature 1..80: note = Synthetic: >HKU9-cand-19450-19529
  source 1..80: mol_type = other DNA
cttggtgttacgtgtacatataacttagtcatatgggattatgaaaataatgcgccattagtgccaaatactgtaggcgt

SEQ ID NO: 14366 - DNA, 80 bp, synthetic construct
  misc_feature 1..80: note = Synthetic: >HKU9-cand-19530-19609
  source 1..80: mol_type = other DNA
ttgtacttacactgatttaacaaagttggacgaccaggttgtgttagttgatggcagacagctagatgcttatagcaagt

SEQ ID NO: 14367 - DNA, 80 bp, synthetic construct
  misc_feature 1..80: note = Synthetic: >HKU9-cand-19610-19689
  source 1..80: mol_type = other DNA
tttgtcagttgaagaatgccgtctatttttcaccaagtaaacctaagtgcatttgtaccaaaggccctacgcacgcgtct

SEQ ID NO: 14368 - DNA, 80 bp, synthetic construct
  misc_feature 1..80: note = Synthetic: >HKU9-cand-19690-19769
  source 1..80: mol_type = other DNA
ataaatggcgtagttgtagaggcgccagataaaggtacagcattttggtatgctgtgagaaaggatggtgcatttgtgca

SEQ ID NO: 14369 - DNA, 80 bp, synthetic construct
  misc_feature 1..80: note = Synthetic: >HKU9-cand-19770-19849
  source 1..80: mol_type = other DNA
acctactgatggttattttacacagtctcgtacactggatgattttcagccacgtactcaattagagatagatttccttg

SEQ ID NO: 14370 - DNA, 80 bp, synthetic construct
  misc_feature 1..80: note = Synthetic: >HKU9-cand-19850-19929
  source 1..80: mol_type = other DNA
atcttgaacagtcatgttttcttgataaatatgacttacatgatctaggttttgagcatattgcctatggtcaatttgaa

SEQ ID NO: 14371 - DNA, 80 bp, synthetic construct
  misc_feature 1..80: note = Synthetic: >HKU9-cand-19930-20009
  source 1..80: mol_type = other DNA
ggtaccataggcggtttacatttgttaattggtgcagtgcgtcgtaaacgcactgcaaatttagttatggaaactgtgtt

SEQ ID NO: 14372 - DNA, 80 bp, synthetic construct
  misc_feature 1..80: note = Synthetic: >HKU9-cand-20010-20089
  source 1..80: mol_type = other DNA
aggtactgacactgtcacatcttatgctgtcatagaccagccaactgcttctagtaagcaagtatgtagtgtctttgaca

SEQ ID NO: 14373 - DNA, 80 bp, synthetic construct
  misc_feature 1..80: note = Synthetic: >HKU9-cand-20090-20169
  source 1..80: mol_type = other DNA
tggttttagatgattttattgcgcttattaaggctcaagataggtcagttgttagtaaggtagttcagtgctgccttgat

SEQ ID NO: 14374 - DNA, 80 bp, synthetic construct
  misc_feature 1..80: note = Synthetic: >HKU9-cand-20170-20249
  source 1..80: mol_type = other DNA
tttaagatgtttagatttatgctgtggtgtaaggatggcaaggtagccaccttttatcctcagttgcaggctaagcaaga

SEQ ID NO: 14375 - DNA, 80 bp, synthetic construct
  misc_feature 1..80: note = Synthetic: >HKU9-cand-20250-20329
  source 1..80: mol_type = other DNA
ttggaaacctggttatagtatgccagcactttataaggtgcaaaatgcagtgctagaaccatgtttgttacataattatg

SEQ ID NO: 14376 - DNA, 80 bp, synthetic construct
  misc_feature 1..80: note = Synthetic: >HKU9-cand-20330-20409
  source 1..80: mol_type = other DNA
gacaggcagctagactgccatctggtacactaatgaatgtggctaaatacactcaattgtgtcagtatttgaatacgtgt

SEQ ID NO: 14377 - DNA, 80 bp, synthetic construct
  misc_feature 1..80: note = Synthetic: >HKU9-cand-20410-20489
  source 1..80: mol_type = other DNA
tctttagctgtaccagcaaagatgcgtgttatacattttggtgctggtagtgataaaggtgtatgtccgggtacagctgt

SEQ ID NO: 14378 - DNA, 80 bp, synthetic construct
  misc_feature 1..80: note = Synthetic: >HKU9-cand-20490-20569
  source 1..80: mol_type = other DNA
gttgaaacagtggttgccaactgacgctttacttgttgataatgatttagacaattgtgcgtcagatgcaaattctactt

SEQ ID NO: 14379 - DNA, 80 bp, synthetic construct
  misc_feature 1..80: note = Synthetic: >HKU9-cand-20570-20649
  source 1..80: mol_type = other DNA
ttgttggcaattgtgagttgtttaatacgccttacaagtgggatcttattattagtgatatgtatgatgcacgtactaag

SEQ ID NO: 14380 - DNA, 80 bp, synthetic construct
  misc_feature 1..80: note = Synthetic: >Lucheng19-cand-26870-26949
  source 1..80: mol_type = other DNA
aacggcataccagtgcctgactttgataattgtgtgaatgggtttataatgcgttacggtgcactctatgttcctgaaga

SEQ ID NO: 14381 - DNA, 80 bp, synthetic construct
  misc_feature 1..80: note = Synthetic: >Lucheng19-cand-26950-27029
  source 1..80: mol_type = other DNA
cacacacgttaaatacgtgccacagaaaaatgagtgctttggacaacttaaagttatcaataatgtgatatggtttataa

SEQ ID NO: 14382 - DNA, 80 bp, synthetic construct
  misc_feature 1..80: note = Synthetic: >Lucheng19-cand-27030-27109
  source 1..80: mol_type = other DNA
caaatcacctaactaatgaaacatgctgttcaaatcgtacaactacaaacccattcatgcctataattgaaaagatttaa

SEQ ID NO: 14383 - DNA, 80 bp, synthetic construct
  misc_feature 1..80: note = Synthetic: >Lucheng19-cand-27110-27189
  source 1..80: mol_type = other DNA
aaatttcaactaacaatgagttccaacgtctcctgggccgaccaagttgaaacccacaacaaacgccaacgttctagctc

SEQ ID NO: 14384 - DNA, 80 bp, synthetic construct
  misc_feature 1..80: note = Synthetic: >Lucheng19-cand-27190-27269
  source 1..80: mol_type = other DNA
cagaggcagaactcaaaacagaaccaatgcatcaaatccgctgtcatggtttaccgcaatcattgacgagtctaacggaa

SEQ ID NO: 14385 - DNA, 80 bp, synthetic construct
  misc_feature 1..80: note = Synthetic: >Lucheng19-cand-27270-27349
  source 1..80: mol_type = other DNA
acttcactagtcttatgccccatagcggtgtacctactggtatcggcactgcagctcagcagtgtggttactggtatcgt

SEQ ID NO: 14386 - DNA, 80 bp, synthetic construct
  misc_feature 1..80: note = Synthetic: >Lucheng19-cand-27350-27429
  source 1..80: mol_type = other DNA
gcaccaacagcctaccaggtcagacgcggcaaaagagtaccgctaccacctgcatggtacttctacttcctgggcacggg

SEQ ID NO: 14387 - DNA, 80 bp, synthetic construct
  misc_feature 1..80: note = Synthetic: >Lucheng19-cand-27430-27509
  source 1..80: mol_type = other DNA
tccacacgctaatgccgcttacggaacagcaatggacggagtcttctgggttaagacgaaaaatggtcagattgacccta

SEQ ID NO: 14388 - DNA, 80 bp, synthetic construct
  misc_feature 1..80: note = Synthetic: >Lucheng19-cand-27510-27589
  source 1..80: mol_type = other DNA
agtctactaaagctcttggtgtacgcgacaacggcacagagcctaagcgcgctaacatacctaacctgccagaagggctg

SEQ ID NO: 14389 - DNA, 80 bp, synthetic construct
  misc_feature 1..80: note = Synthetic: >Lucheng19-cand-27590-27669
  source 1..80: mol_type = other DNA
cgcgtaaaccttcctaatgcctctagaccacaatccagagctcagtcacaaaatagatcgcagaatacttcacgcgcatc

SEQ ID NO: 14390 - DNA, 80 bp, synthetic construct
  misc_feature 1..80: note = Synthetic: >Lucheng19-cand-27670-27749
  source 1..80: mol_type = other DNA
ctccatcaacagaaacaactccagagctcctagtgtagatagaactaaagaagacctcaaagcagttgtttcacagctcc

SEQ ID NO: 14391 - DNA, 80 bp, synthetic construct
  misc_feature 1..80: note = Synthetic: >Lucheng19-cand-27750-27829
  source 1..80: mol_type = other DNA
ttgcggagatgggcataagcaaaaattccaaaaaaactcaaaaacagtcaaaaaagaagaaaggcgcaacaccaactgca

SEQ ID NO: 14392 - DNA, 80 bp, synthetic construct
  misc_feature 1..80: note = Synthetic: >Lucheng19-cand-27830-27909
  source 1..80: mol_type = other DNA
acaccacaccccaatcaagatggcaaaccagtatggaagaaaaaacctaacaaagaagaaaatgtcacacaatgctttgg

SEQ ID NO: 14393 - DNA, 80 bp, synthetic construct
  misc_feature 1..80: note = Synthetic: >Lucheng19-cand-27910-27989
  source 1..80: mol_type = other DNA
acctcgcagcgacaacaaaaattttggtgatgctgagttcctcaagcagggcgttgatgaccaccgctttaaaaccgcct

SEQ ID NO: 14394 - DNA, 80 bp, synthetic construct
  misc_feature 1..80: note = Synthetic: >Lucheng19-cand-27990-28069
  source 1..80: mol_type = other DNA
cttattacgctccaggcactgcagcctccctgtttgactccaagataactgtgactgacgcccatgatggcaagaaaaga

SEQ ID NO: 14395 - DNA, 80 bp, synthetic construct
  misc_feature 1..80: note = Synthetic: >Lucheng19-cand-28070-28149
  source 1..80: mol_type = other DNA
gtgacctttcacaccacaatagaagttgaccccaacaaaccagagttcgaacttttcatagcccaaattgatgcattcaa

SEQ ID NO: 14396 - DNA, 80 bp, synthetic construct
  misc_feature 1..80: note = Synthetic: >MERS-cand-1840-1919
  source 1..80: mol_type = other DNA
cgtgattatttagctgactatgacgtagcagtcactgccggcccattcatggataatgctattaatgttggtggtacagg

SEQ ID NO: 14397 - DNA, 80 bp, synthetic construct
  misc_feature 1..80: note = Synthetic: >MERS-cand-1920-1999
  source 1..80: mol_type = other DNA
attacagtatgccgccattactgcaccttatgtagttctcactggcttaggtgagtcctttaagaaagttgcaaccatac

SEQ ID NO: 14398 - DNA, 80 bp, synthetic construct
  misc_feature 1..80: note = Synthetic: >MERS-cand-2000-2079
  source 1..80: mol_type = other DNA
cgtacaaggtttgcaactctgttaaggatactctgacttattatgctcacagcgtgttgtacagagtttttccttatgac

SEQ ID NO: 14399 - DNA, 80 bp, synthetic construct
  misc_feature 1..80: note = Synthetic: >MERS-cand-2080-2159
  source 1..80: mol_type = other DNA
atggattctggtgtgtcatcctttagtgaactactttttgattgcgttgatctttcagtagcttctacctattttttagt

SEQ ID NO: 14400 - DNA, 80 bp, synthetic construct
  misc_feature 1..80: note = Synthetic: >MERS-cand-2160-2239
  source 1..80: mol_type = other DNA
ccgcctcttgcaagataagactggcgactttatgtctacaattattacttcctgccaaactgctgttagtaagcttctag

SEQ ID NO: 14401 - DNA, 80 bp, synthetic construct
  misc_feature 1..80: note = Synthetic: >MERS-cand-2240-2319
  source 1..80: mol_type = other DNA
atacatgttttgaagctacagaagcaacatttaacttcttgttagatttggcaggattgttcagaatctttcttcgcaat

SEQ ID NO: 14402 - DNA, 80 bp, synthetic construct
  misc_feature 1..80: note = Synthetic: >MERS-cand-2320-2399
  source 1..80: mol_type = other DNA
gcctatgtgtacacttcacaagggtttgtggtggtcaatggcaaagtttctacacttgtcaaacaagtgttagacttgct

SEQ ID NO: 14403 - DNA, 80 bp, synthetic construct
  misc_feature 1..80: note = Synthetic: >MERS-cand-2400-2479
  source 1..80: mol_type = other DNA
taataagggtatgcaacttttgcatacaaaggtctcctgggctggttctaatatcagtgctgttatctacagcggcaggg

SEQ ID NO: 14404 - DNA, 80 bp, synthetic construct
  misc_feature 1..80: note = Synthetic: >MERS-cand-2480-2559
  source 1..80: mol_type = other DNA
agtctctaatattcccatcgggaacctattactgtgtcaccactaaggctaagtccgttcaacaagatcttgacgttatt

SEQ ID NO: 14405 - DNA, 80 bp, synthetic construct
  misc_feature 1..80: note = Synthetic: >MERS-cand-2560-2639
  source 1..80: mol_type = other DNA
ttgcctggtgagttttccaagaagcagttaggactgctccaacctactgacaattctacaactgttagtgttactgtatc

SEQ ID NO: 14406 - DNA, 80 bp, synthetic construct
  misc_feature 1..80: note = Synthetic: >MERS-cand-2640-2719
  source 1..80: mol_type = other DNA
cagtaacatggttgaaactgttgtgggtcaacttgagcaaactaatatgcatagtcctgatgttatagtaggtgactatg

SEQ ID NO: 14407 - DNA, 80 bp, synthetic construct
  misc_feature 1..80: note = Synthetic: >MERS-cand-2720-2799
  source 1..80: mol_type = other DNA
tcattattagtgaaaaattgtttgtgcgtagtaaggaagaagacggatttgccttctaccctgcttgcactaatggtcat

SEQ ID NO: 14408 - DNA, 80 bp, synthetic construct
  misc_feature 1..80: note = Synthetic: >MERS-cand-2800-2879
  source 1..80: mol_type = other DNA
gctgtaccgactctctttagacttaagggaggtgcacctgtaaaaaaagtagcctttggcggtgatcaagtacatgaggt

SEQ ID NO: 14409 - DNA, 80 bp, synthetic construct
  misc_feature 1..80: note = Synthetic: >MERS-cand-2880-2959
  source 1..80: mol_type = other DNA
tgctgctgtaagaagtgttactgtcgagtacaacattcatgctgtattagacacactacttgcttcttctagtcttagaa

SEQ ID NO: 14410 - DNA, 80 bp, synthetic construct
  misc_feature 1..80: note = Synthetic: >MERS-cand-2960-3039
  source 1..80: mol_type = other DNA
cctttgttgtagataagtctttgtcaattgaggagtttgctgacgtagtaaaggaacaagtctcagacttgcttgttaaa

SEQ ID NO: 14411 - DNA, 80 bp, synthetic construct
  misc_feature 1..80: note = Synthetic: >MERS-cand-3040-3119
  source 1..80: mol_type = other DNA
ttactgcgtggaatgccgattccagattttgatttagacgattttattgacgcaccatgctattgctttaacgctgaggg

SEQ ID NO: 14412 - DNA, 80 bp, synthetic construct
  misc_feature 1..80: note = Synthetic: >MERS-cand-5680-5759
  source 1..80: mol_type = other DNA
aatgtcgtacggtattctttggacggtaatttcagaacagaggttgatcccgacctatctgctttctatgttaaggatgg

SEQ ID NO: 14413 - DNA, 80 bp, synthetic construct
  misc_feature 1..80: note = Synthetic: >MERS-cand-5760-5839
  source 1..80: mol_type = other DNA
taaatactttacaagtgaaccacccgtaacatattcaccagctacaattttagctggtagtgtctacactaatagctgcc

SEQ ID NO: 14414 - DNA, 80 bp, synthetic construct
  misc_feature 1..80: note = Synthetic: >MERS-cand-5840-5919
  source 1..80: mol_type = other DNA
ttgtatcgtctgatggacaacctggcggtgatgctattagtttgagttttaataaccttttagggtttgattctagtaaa

SEQ ID NO: 14415 - DNA, 80 bp, synthetic construct
  misc_feature 1..80: note = Synthetic: >MERS-cand-5920-5999
  source 1..80: mol_type = other DNA
ccagtcactaagaaatacacttactccttcttgcctaaagaagacggcgatgtgttgttggctgagtttgacacttatga

SEQ ID NO: 14416 - DNA, 80 bp, synthetic construct
  misc_feature 1..80: note = Synthetic: >MERS-cand-6000-6079
  source 1..80: mol_type = other DNA
ccctatttataagaatggtgccatgtataaaggcaaaccaattctttgggtcaacaaagcatcttatgatactaatctta

SEQ ID NO: 14417 - DNA, 80 bp, synthetic construct
  misc_feature 1..80: note = Synthetic: >MERS-cand-6080-6159
  source 1..80: mol_type = other DNA
ataagttcaatagagctagtttgcgtcaaatttttgacgtagcccccattgaactcgaaaataaattcacacctttgagt

SEQ ID NO: 14418 - DNA, 80 bp, synthetic construct
  misc_feature 1..80: note = Synthetic: >MERS-cand-6160-6239
  source 1..80: mol_type = other DNA
gtggcgtctacaccagttgaacctccaactgtagatgtggtagcacttcaacaggaaatgacaattgtcaaatgtaaggg

SEQ ID NO: 14419 - DNA, 80 bp, synthetic construct
  misc_feature 1..80: note = Synthetic: >MERS-cand-6240-6319
  source 1..80: mol_type = other DNA
tttaaataaacctttcgtgaaggacaatgtcagtttcgttgttgatgactcaggtactcccgttgttgagtatctgtcta

SEQ ID NO: 14420 - DNA, 80 bp, synthetic construct
  misc_feature 1..80: note = Synthetic: >MERS-cand-6320-6399
  source 1..80: mol_type = other DNA
aagaagatctacatacattgtatgtagaccctaagtatcaagtcattgtcttaaaagacaatgtactttcttctatgctt

SEQ ID NO: 14421 - DNA, 80 bp, synthetic construct
  misc_feature 1..80: note = Synthetic: >MERS-cand-6400-6479
  source 1..80: mol_type = other DNA
agattgcacaccgttgagtcaggtgatattaacgttgttgcagcttccggatctttgacacgtaaagtgaagttactatt

SEQ ID NO: 14422 - DNA, 80 bp, synthetic construct
  misc_feature 1..80: note = Synthetic: >MERS-cand-6480-6559
  source 1..80: mol_type = other DNA
tagggcttcattttatttcaaagaatttgctacccgcactttcactgctaccactgctgtaggtagttgtataaagagtg

SEQ ID NO: 14423 - DNA, 80 bp, synthetic construct
  misc_feature 1..80: note = Synthetic: >MERS-cand-6560-6639
  source 1..80: mol_type = other DNA
tagtgcggcatctaggtgttactaaaggcatattgacaggctgttttagttttgtcaagatgttatttatgcttccacta

SEQ ID NO: 14424 - DNA, 80 bp, synthetic construct
  misc_feature 1..80: note = Synthetic: >MERS-cand-6640-6719
  source 1..80: mol_type = other DNA
gcttactttagtgattcaaaactcggcaccacagaggttaaagtgagtgctttgaaaacagctggcgttgtgacaggtaa

SEQ ID NO: 14425 - DNA, 80 bp, synthetic construct
  misc_feature 1..80: note = Synthetic: >MERS-cand-6720-6799
  source 1..80: mol_type = other DNA
tgttgtaaaacagtgttgcactgctgctgttgatttaagtatggataagttgcgccgtgtggattggaaatcaaccctac

SEQ ID NO: 14426 - DNA, 80 bp, synthetic construct
  misc_feature 1..80: note = Synthetic: >MERS-cand-6800-6879
  source 1..80: mol_type = other DNA
ggttgttacttatgttatgcacaactatggtattgttgtcttctgtgtatcacttgtatgtcttcaatcaggtcttatca

SEQ ID NO: 14427 - DNA, 80 bp, synthetic construct
  misc_feature 1..80: note = Synthetic: >MERS-cand-6880-6959
  source 1..80: mol_type = other DNA
agtgatgttatgtttgaagatgcccaaggtttgaaaaagttctacaaagaagttagagcttacctaggaatctcttctgc

SEQ ID NO: 14428 - DNA, 80 bp, synthetic construct
  misc_feature 1..80: note = Synthetic: >MERS-cand-9520-9599
  source 1..80: mol_type = other DNA
ccattgtgtatagtaccttacactgcattgtactattatgctacattctattttactaatgagcctgcatttattatgca

SEQ ID NO: 14429 - DNA, 80 bp, synthetic construct
  misc_feature 1..80: note = Synthetic: >MERS-cand-9600-9679
  source 1..80: mol_type = other DNA
tgtttcttggtacattatgttcgggcctatcgttcccatatggatgacctgcgtctatacagttgcaatgtgctttagac

SEQ ID NO: 14430 - DNA, 80 bp, synthetic construct
  misc_feature 1..80: note = Synthetic: >MERS-cand-9680-9759
  source 1..80: mol_type = other DNA
acttcttctgggttttagcttattttagtaagaaacatgtagaagtttttactgatggtaagcttaattgtagtttccag

SEQ ID NO: 14431 - DNA, 80 bp, synthetic construct
  misc_feature 1..80: note = Synthetic: >MERS-cand-9760-9839
  source 1..80: mol_type = other DNA
gacgctgcctctaatatctttgttattaacaaggacacttatgcagctcttagaaactctttaactaatgatgcctattc

SEQ ID NO: 14432 - DNA, 80 bp, synthetic construct
  misc_feature 1..80: note = Synthetic: >MERS-cand-9840-9919
  source 1..80: mol_type = other DNA
acgatttttggggttgtttaacaagtataagtacttctctggtgctatggaaacagccgcttatcgtgaagctgcagcat

SEQ ID NO: 14433 - DNA, 80 bp, synthetic construct
  misc_feature 1..80: note = Synthetic: >MERS-cand-9920-9999
  source 1..80: mol_type = other DNA
gtcatcttgctaaagccttacaaacatacagcgagactggtagtgatcttctttaccaaccacccaactgtagcataacc

SEQ ID NO: 14434 - DNA, 80 bp, synthetic construct
  misc_feature 1..80: note = Synthetic: >MERS-cand-10000-10079
  source 1..80: mol_type = other DNA
tctggcgtgttgcaaagcggtttggtgaaaatgtcacatcccagtggagatgttgaggcttgtatggttcaggttacctg

SEQ ID NO: 14435 - DNA, 80 bp, synthetic construct
  misc_feature 1..80: note = Synthetic: >MERS-cand-10080-10159
  source 1..80: mol_type = other DNA
cggtagcatgactcttaatggtctttggcttgacaacacagtctggtgcccacgacacgtaatgtgcccggctgaccagt

SEQ ID NO: 14436 - DNA, 80 bp, synthetic construct
  misc_feature 1..80: note = Synthetic: >MERS-cand-10160-10239
  source 1..80: mol_type = other DNA
tgtctgatcctaattatgatgccttgttgatttctatgactaatcatagtttcagtgtgcaaaaacacattggcgctcca

SEQ ID NO: 14437 - DNA, 80 bp, synthetic construct
  misc_feature 1..80: note = Synthetic: >MERS-cand-10240-10319
  source 1..80: mol_type = other DNA
gcaaacttgcgtgttgttggtcatgccatgcaaggcactcttttgaagttgactgtcgatgttgctaaccctagcactcc

SEQ ID NO: 14438 - DNA, 80 bp, synthetic construct
  misc_feature 1..80: note = Synthetic: >MERS-cand-10320-10399
  source 1..80: mol_type = other DNA
agcctacacttttacaacagtgaaacctggcgcagcatttagtgtgttagcatgctataatggtcgtccgactggtacat

SEQ ID NO: 14439 - DNA, 80 bp, synthetic construct
  misc_feature 1..80: note = Synthetic: >MERS-cand-10400-10479
  source 1..80: mol_type = other DNA
tcactgttgtaatgcgccctaactacacaattaagggttcctttctgtgtggttcttgtggtagtgttggttacaccaag

SEQ ID NO: 14440 - DNA, 80 bp, synthetic construct
  misc_feature 1..80: note = Synthetic: >MERS-cand-10480-10559
  source 1..80: mol_type = other DNA
gagggtagtgtgatcaatttttgttacatgcatcaaatggaacttgctaatggtacacataccggttcagcatttgatgg

SEQ ID NO: 14441 - DNA, 80 bp, synthetic construct
  misc_feature 1..80: note = Synthetic: >MERS-cand-10560-10639
  source 1..80: mol_type = other DNA
tactatgtatggtgcctttatggataaacaagtgcaccaagttcagttaacagacaaatactgcagtgttaatgtagtag

SEQ ID NO: 14442 - DNA, 80 bp, synthetic construct
  misc_feature 1..80: note = Synthetic: >MERS-cand-10640-10719
  source 1..80: mol_type = other DNA
cttggctttacgcagcaatacttaatggttgcgcttggtttgtaaaacctaatcgcactagtgttgtttcttttaatgaa

SEQ ID NO: 14443 - DNA, 80 bp, synthetic construct
  misc_feature 1..80: note = Synthetic: >MERS-cand-10720-10799
  source 1..80: mol_type = other DNA
tgggctcttgccaaccaattcactgaatttgttggcactcaatccgttgacatgttagctgtcaaaacaggcgttgctat

SEQ ID NO: 14444 - DNA, 80 bp, synthetic construct
  misc_feature 1..80: note = Synthetic: >MERS-cand-13360-13439
  source 1..80: mol_type = other DNA
tatgggtgcaattgtgactcgcttaggcaagcagcactgccccaatctaaagattccaattttttaaacgagtccggggt

SEQ ID NO: 14445 - DNA, 80 bp, synthetic construct
  misc_feature 1..80: note = Synthetic: >MERS-cand-13440-13519
  source 1..80: mol_type = other DNA
tctattgtaaatgcccgaatagaaccctgttcaagtggtttgtccactgatgtcgtctttagggcatttgacatctgcaa

SEQ ID NO: 14446 - DNA, 80 bp, synthetic construct
  misc_feature 1..80: note = Synthetic: >MERS-cand-13520-13599
  source 1..80: mol_type = other DNA
ctataaggctaaggttgctggtattggaaaatactacaagactaatacttgtaggtttgtagaattagatgaccaagggc

SEQ ID NO: 14447 - DNA, 80 bp, synthetic construct
  misc_feature 1..80: note = Synthetic: >MERS-cand-13600-13679
  source 1..80: mol_type = other DNA
atcatttagactcctattttgtcgttaagaggcatactatggagaattatgaactagagaagcactgttacgatttgtta

SEQ ID NO: 14448 - DNA, 80 bp, synthetic construct
  misc_feature 1..80: note = Synthetic: >MERS-cand-13680-13759
  source 1..80: mol_type = other DNA
cgtgactgtgatgctgtagctccccatgatttcttcatctttgatgtagacaaagttaaaacacctcatattgtacgtca

SEQ ID NO: 14449 - DNA, 80 bp, synthetic construct
  misc_feature 1..80: note = Synthetic: >MERS-cand-13760-13839
  source 1..80: mol_type = other DNA
gcgtttaactgagtacactatgatggatcttgtatatgccctgaggcactttgatcaaaatagcgaagtgcttaaggcta

SEQ ID NO: 14450 - DNA, 80 bp, synthetic construct
  misc_feature 1..80: note = Synthetic: >MERS-cand-13840-13919
  source 1..80: mol_type = other DNA
tcttagtgaagtatggttgctgtgatgttacctactttgaaaataaactctggtttgattttgttgaaaatcccagtgtt

SEQ ID NO: 14451 - DNA, 80 bp, synthetic construct
  misc_feature 1..80: note = Synthetic: >MERS-cand-13920-13999
  source 1..80: mol_type = other DNA
attggtgtttatcataaacttggagaacgtgtacgccaagctatcttaaacactgttaaattttgtgaccacatggtcaa

SEQ ID NO: 14452 - DNA, 80 bp, synthetic construct
  misc_feature 1..80: note = Synthetic: >MERS-cand-14000-14079
  source 1..80: mol_type = other DNA
ggctggtttagtcggtgtgctcacactagacaaccaggaccttaatggcaagtggtatgattttggtgacttcgtaatca

SEQ ID NO: 14453 - DNA, 80 bp, synthetic construct
  misc_feature 1..80: note = Synthetic: >MERS-cand-14080-14159
  source 1..80: mol_type = other DNA
ctcaacctggttcaggagtagctatagttgatagctactattcttatttgatgcctgtgctctcaatgaccgattgtctg

SEQ ID NO: 14454 - DNA, 80 bp, synthetic construct
  misc_feature 1..80: note = Synthetic: >MERS-cand-14160-14239
  source 1..80: mol_type = other DNA
gccgctgagacacatagggattgtgattttaataaaccactcattgagtggccacttactgagtatgattttactgatta

SEQ ID NO: 14455 - DNA, 80 bp, synthetic construct
  misc_feature 1..80: note = Synthetic: >MERS-cand-14240-14319
  source 1..80: mol_type = other DNA
taaggtacaactctttgagaagtactttaaatattgggatcagacgtatcacgcaaattgcgttaattgtactgatgacc

SEQ ID NO: 14456 - DNA, 80 bp, synthetic construct
  misc_feature 1..80: note = Synthetic: >MERS-cand-14320-14399
  source 1..80: mol_type = other DNA
gttgtgtgttacattgtgctaatttcaatgtattgtttgctatgaccatgcctaagacttgtttcggacccatagtccga

SEQ ID NO: 14457 - DNA, 80 bp, synthetic construct
  misc_feature 1..80: note = Synthetic: >MERS-cand-14400-14479
  source 1..80: mol_type = other DNA
aagatctttgttgatggcgtgccatttgtagtatcttgtggttatcactacaaagaattaggtttagtcatgaatatgga

SEQ ID NO: 14458 - DNA, 80 bp, synthetic construct
  misc_feature 1..80: note = Synthetic: >MERS-cand-14480-14559
  source 1..80: mol_type = other DNA
tgttagtctccatagacataggctctctcttaaggagttgatgatgtatgccgctgatccagccatgcacattgcctcct

SEQ ID NO: 14459 - DNA, 80 bp, synthetic construct
  misc_feature 1..80: note = Synthetic: >MERS-cand-14560-14639
  source 1..80: mol_type = other DNA
ctaacgcttttcttgatttgaggacatcatgttttagtgtcgctgcacttacaactggtttgacttttcaaactgtgcgg

SEQ ID NO: 14460 - DNA, 80 bp, synthetic construct
  misc_feature 1..80: note = Synthetic: >NL63-cand-14390-14469
  source 1..80: mol_type = other DNA
gttgtttattctaatggtggtttttattttaagccaggtggtacgacttctggtgacgctagtacagcttatgctaattc

SEQ ID NO: 14461 - DNA, 80 bp, synthetic construct
  misc_feature 1..80: note = Synthetic: >NL63-cand-14470-14549
  source 1..80: mol_type = other DNA
tatttttaacatttttcaagccgtgagttctaacattaacaggttgcttagtgtcccatcagattcatgtaataatgtta

SEQ ID NO: 14462 - DNA, 80 bp, synthetic construct
  misc_feature 1..80: note = Synthetic: >NL63-cand-14550-14629
  source 1..80: mol_type = other DNA
atgttagggatctacaacgacgtctgtatgataattgctataggttaactagtgttgaagagtcattcattgatgattat

SEQ ID NO: 14463 - DNA, 80 bp, synthetic construct
  misc_feature 1..80: note = Synthetic: >NL63-cand-14630-14709
  source 1..80: mol_type = other DNA
tatggttatcttaggaaacatttttcaatgatgattctctctgatgacggtgttgtctgttataacaaggattatgctga

SEQ ID NO: 14464 - DNA, 80 bp, synthetic construct
  misc_feature 1..80: note = Synthetic: >NL63-cand-14710-14789
  source 1..80: mol_type = other DNA
gttaggttatatagcagacattagtgcttttaaagccactttgtattaccagaataatgtctttatgagtacttctaaat

SEQ ID NO: 14465 - DNA, 80 bp, synthetic construct
  misc_feature 1..80: note = Synthetic: >NL63-cand-14790-14869
  source 1..80: mol_type = other DNA
gttgggttgaagaagatttaactaagggaccacatgagttttgttcccagcatactatgcaaatagttgacaaagatggt

SEQ ID NO: 14466 - DNA, 80 bp, synthetic construct
  misc_feature 1..80: note = Synthetic: >NL63-cand-14870-14949
  source 1..80: mol_type = other DNA
acctattatttgccttacccagatcctagtaggatcttgtcagctggtgtttttgttgatgatgttgttaagacagatgc

SEQ ID NO: 14467 - DNA, 80 bp, synthetic construct
  misc_feature 1..80: note = Synthetic: >NL63-cand-14950-15029
  source 1..80: mol_type = other DNA
tgttgttttgttagaacgttatgtgtctttagctattgatgcataccctctttcaaaacaccctaattctgaatatcgta

SEQ ID NO: 14468 - DNA, 80 bp, synthetic construct
  misc_feature 1..80: note = Synthetic: >NL63-cand-15030-15109
  source 1..80: mol_type = other DNA
aggttttttacgtattacttgattgggttaagcatcttaacaaaaatttgaatgagggtgttcttgaatctttttctgtt

SEQ ID NO: 14469 - DNA, 80 bp, synthetic construct
  misc_feature 1..80: note = Synthetic: >NL63-cand-15110-15189
  source 1..80: mol_type = other DNA
acacttcttgataatcaagaagataagttttggtgtgaagatttttatgctagtatgtatgaaaattctacaatattgca

SEQ ID NO: 14470 - DNA, 80 bp, synthetic construct
  misc_feature 1..80: note = Synthetic: >NL63-cand-15190-15269
  source 1..80: mol_type = other DNA
agctgctggtttatgtgttgtttgtggttcacaaactgtacttcgttgtggtgattgtctgcgtaagcctatgttgtgca

SEQ ID NO: 14471 - DNA, 80 bp, synthetic construct
  misc_feature 1..80: note = Synthetic: >NL63-cand-15270-15349
  source 1..80: mol_type = other DNA
ctaaatgcgcatatgatcatgtatttggtaccgaccacaagtttattttggctataacaccgtatgtatgtaatgcatca

SEQ ID NO: 14472 - DNA, 80 bp, synthetic construct
  misc_feature 1..80: note = Synthetic: >NL63-cand-15350-15429
  source 1..80: mol_type = other DNA
ggttgtggtgttagtgatgtcaaaaaattgtatcttggtggtttgaattactattgtacaaatcataaaccacagttgtc

SEQ ID NO: 14473 - DNA, 80 bp, synthetic construct
  misc_feature 1..80: note = Synthetic: >NL63-cand-15430-15509
  source 1..80: mol_type = other DNA
ttttccattatgttcagctggtaatatatttggtttatataaaaattcagcaactggttccttagatgttgaagttttta

SEQ ID NO: 14474 - DNA, 80 bp, synthetic construct
  misc_feature 1..80: note = Synthetic: >NL63-cand-15510-15589
  source 1..80: mol_type = other DNA
ataggcttgcaacgtctgattggactgatgttagggactataaacttgctaatgatgttaaagatacacttagactcttt

SEQ ID NO: 14475 - DNA, 80 bp, synthetic construct
  misc_feature 1..80: note = Synthetic: >NL63-cand-15590-15669
  source 1..80: mol_type = other DNA
gcggctgaaactattaaagctaaagaagagagtgttaagtcttcttatgcttttgcaactcttaaagaggttgttggacc

SEQ ID NO: 14476 - DNA, 80 bp, synthetic construct
  misc_feature 1..80: note = Synthetic: >SARSCoV-cand-13880-13959
  source 1..80: mol_type = other DNA
ctgacatcttacgcgtatatgctaacttaggtgagcgtgtacgccaatcattattaaagactgtacaattctgcgatgct

SEQ ID NO: 14477 - DNA, 80 bp, synthetic construct
  misc_feature 1..80: note = Synthetic: >SARSCoV-cand-14040-14119
  source 1..80: mol_type = other DNA
cgtacaagtagcaccaggctgcggagttcctattgtggattcatattactcattgctgatgcccatcctcactttgacta

SEQ ID NO: 14478 - DNA, 80 bp, synthetic construct
  misc_feature 1..80: note = Synthetic: >SARSCoV-cand-14200-14279
  source 1..80: mol_type = other DNA
acggaagagagactttgtctcttcgaccgttattttaaatattgggaccagacataccatcccaattgtattaactgttt

SEQ ID NO: 14479 - DNA, 80 bp, synthetic construct
  misc_feature 1..80: note = Synthetic: >SARSCoV-cand-14520-14599
  source 1..80: mol_type = other DNA
agcttctggcaatttattgctagataaacgcactacatgcttttcagtagctgcactaacaaacaatgttgcttttcaaa

SEQ ID NO: 14480 - DNA, 80 bp, synthetic construct
  misc_feature 1..80: note = Synthetic: >SARSCoV-cand-14600-14679
  source 1..80: mol_type = other DNA
ctgtcaaacccggtaattttaataaagacttttatgactttgctgtgtctaaaggtttctttaaggaaggaagttctgtt

SEQ ID NO: 14481 - DNA, 80 bp, synthetic construct
  misc_feature 1..80: note = Synthetic: >SARSCoV-cand-15080-15159
  source 1..80: mol_type = other DNA
gacagtttcatcagaaattattgaagtcaatagccgccactagaggagctactgtggtaattggaacaagcaagttttac

SEQ ID NO: 14482 - DNA, 80 bp, synthetic construct
  misc_feature 1..80: note = Synthetic: >Shrew-cand-15700-15779
  source 1..80: mol_type = other DNA
tgtatgatgagttagattttggtgtgattgaccctattgttttgcatagtactggtttatttaaaagttgtgtgagagtg

SEQ ID NO: 14483 - DNA, 80 bp, synthetic construct
  misc_feature 1..80: note = Synthetic: >Shrew-cand-15780-15859
  source 1..80: mol_type = other DNA
ccatatgaggttggtcctgcgtatgcaaccacttttatgcacttaactgatcgttttaaagttagtaatgatttggctgt

SEQ ID NO: 14484 - DNA, 80 bp, synthetic construct
  misc_feature 1..80: note = Synthetic: >Shrew-cand-15860-15939
  source 1..80: mol_type = other DNA
tgcattaccatctgttaatcctacatttgaagatgtggttaatttgatgggttttaaattagatgtggttccagatgggt

SEQ ID NO: 14485 - DNA, 80 bp, synthetic construct
  misc_feature 1..80: note = Synthetic: >Shrew-cand-15940-16019
  source 1..80: mol_type = other DNA
ataaccctttgttttgtactaagagttatgcaattcaacatgtaagagggtggattggtttagatgtggaaagtgtacat

SEQ ID NO: 14486 - DNA, 80 bp, synthetic construct
  misc_feature 1..80: note = Synthetic: >Shrew-cand-16020-16099
  source 1..80: mol_type = other DNA
tgttgcacagataacatcggaactaatctacctctacaaataggtttttcaaatggtttgaattttattgttaaacctga

SEQ ID NO: 14487 - DNA, 80 bp, synthetic construct
  misc_feature 1..80: note = Synthetic: >Shrew-cand-16100-16179
  source 1..80: mol_type = other DNA
ggcttgtgttatgaataataataaagtttattggaaaaatgttaaaactaaagtgcctcctggtgaacagtttacacatt

SEQ ID NO: 14488 - DNA, 80 bp, synthetic construct
  misc_feature 1..80: note = Synthetic: >Shrew-cand-16180-16259
  source 1..80: mol_type = other DNA
taatacctttgatgagaaaaacacaagattggagtgttgttcgtaagagaatagtttcaatgttgtgtgatcaatttaag

SEQ ID NO: 14489 - DNA, 80 bp, synthetic construct
  misc_feature 1..80: note = Synthetic: >Shrew-cand-16260-16339
  source 1..80: mol_type = other DNA
ggtgttacaagtgagattattattttaacgtgggcgcatggtatggagttgatgaccatgcgttattttgttaaaatagg

SEQ ID NO: 14490 - DNA, 80 bp, synthetic construct
  misc_feature 1..80: note = Synthetic: >Shrew-cand-16340-16419
  source 1..80: mol_type = other DNA
agttgtaaaatgttgttattgtggtatggaggctaaattttatgatagtgtaaatgtagagtttaaatgtttgtttcatg

SEQ ID NO: 14491 - DNA, 80 bp, synthetic construct
  misc_feature 1..80: note = Synthetic: >Shrew-cand-16420-16499
  source 1..80: mol_type = other DNA
gttatggctgtgattatttatataaccctaagcttgtagatgtgcaacagtggggttatgtaggtaagttagctgataat

SEQ ID NO: 14492 - DNA, 80 bp, synthetic construct
  misc_feature 1..80: note = Synthetic: >Shrew-cand-16500-16579
  source 1..80: mol_type = other DNA
catgatatgtattgtgctttacatcgtaatgctcatgtagcatctggagatgctattatgacacgatgtttagctgttta

SEQ ID NO: 14493 - DNA, 80 bp, synthetic construct
  misc_feature 1..80: note = Synthetic: >Shrew-cand-16580-16659
  source 1..80: mol_type = other DNA
tgaatgttttgtaaagaaggttgaatggaatattgtttatccttatataggtgaagaaaaagctattaatgctgctggta

SEQ ID NO: 14494 - DNA, 80 bp, synthetic construct
  misc_feature 1..80: note = Synthetic: >Shrew-cand-16660-16739
  source 1..80: mol_type = other DNA
gatttgttgaaagacatattatgagtgtctttctaaaattgtataaaccagaagcagttcacgatattggtaatccaaaa

SEQ ID NO: 14495 - DNA, 80 bp, synthetic construct
  misc_feature 1..80: note = Synthetic: >Shrew-cand-16740-16819
  source 1..80: mol_type = other DNA
gggattaggtgtgttgtttatgataaaagttggtattgttatgataaagatccagtgggtagtaatgttaaagaattgtg

SEQ ID NO: 14496 - DNA, 80 bp, synthetic construct
  misc_feature 1..80: note = Synthetic: >Shrew-cand-16820-16899
  source 1..80: mol_type = other DNA
ttatgattatgaaacacatggtcaatttaaaggacttatgttgttctggaattgtaatgtaagttgttatcctgaatttt

SEQ ID NO: 14497 - DNA, 80 bp, synthetic construct
  misc_feature 1..80: note = Synthetic: >Shrew-cand-16900-16979
  source 1..80: mol_type = other DNA
ctttggtttgtagatttgatacacgtgtgtgtaataagtataatttagaaggtgttaatggtggttctttgtatgtgaat

SEQ ID NO: 14498 - DNA, 80 bp, synthetic construct
  misc_feature 1..80: note = Synthetic: >BtSk_AlphaCoV-cand-16450-16529
  source 1..80: mol_type = other DNA
gaagttaatgcagacatttgtgttgtagatgaggtgtccatgtgtactaactatgatttgtctgttataaaccaacgtgt

SEQ ID NO: 14499 - DNA, 80 bp, synthetic construct
  misc_feature 1..80: note = Synthetic: >Sb512-cand-16500-16579
  source 1..80: mol_type = other DNA
gttaatgcagacatttgtgttgtagatgaggtgtccatgtgtactaactatgatttgtctgttataaaccaacgtgttaa

SEQ ID NO: 14500 - DNA, 80 bp, synthetic construct
  misc_feature 1..80: note = Synthetic: >Sk512R-cand-16480-16559
  source 1..80: mol_type = other DNA
tgcgttaccagaagttaatgcagacatttgtgttgtggatgaggtgtccatgtgtactaactatgatttgtctgttataa

SEQ ID NO: 14501 - DNA, 80 bp, synthetic construct
  misc_feature 1..80: note = Synthetic: >HKU24-cand-16820-16899
  source 1..80: mol_type = other DNA
gttaggtgagtatgtttttgataagagtgagttgactaatggtgtctattatagagccacaaccacttataagctatcag

SEQ ID NO: 14502 - DNA, 80 bp, synthetic construct
  misc_feature 1..80: note = Synthetic: >BtRl_BetaCoV-cand-0-79
  source 1..80: mol_type = other DNA
gtttttacctacccaggaaaagccaaccaacttcgatctcttgtagatctgttctctaaacgaactttaaaatctgtgtg

SEQ ID NO: 14503 - DNA, 80 bp, synthetic construct
  misc_feature 1..80: note = Synthetic: >SARSRC-cand-0-79
  source 1..80: mol_type = other DNA
taggtttttacctacccaggaaaagccaaccaacctcgatctcttgtagatctgttctttaaacgaacttcaaaatctgt

SEQ ID NO: 14504 - DNA, 80 bp, synthetic construct
  misc_feature 1..80: note = Synthetic: >Delta-cand-26600-26679
  source 1..80: mol_type = other DNA
ttacagtctcgtggttcttgctaatgctaatccaattgcatttagcatactacctcggaaaattcttatcaatggtgagc

SEQ ID NO: 14505 - DNA, 80 bp, synthetic construct
  misc_feature 1..80: note = Synthetic: >Sparrow-cand-24070-24149
  source 1..80: mol_type = other DNA
tcgtggttcttgctaatgcaaatccaattgcacttagtatactacctcggaaaattcttatcaatggtgagcctttactg

SEQ ID NO: 14506 - DNA, 80 bp, synthetic construct
  misc_feature 1..80: note = Synthetic: >Quail-cand-23790-23869
  source 1..80: mol_type = other DNA
cttacagtctcgtggttcttgctaatgcaaatccaattgcatttagtatattacctcggaaaattcttatcaatggtgag

SEQ ID NO: 14507 - DNA, 80 bp, synthetic construct
  misc_feature 1..80: note = Synthetic: >HKU5R-cand-17520-17599
  source 1..80: mol_type = other DNA
aaacaaattctcagtatttgttcagtactattaatgcactaccagaaacgtctgctgatatactggtagttgatgaagtt

SEQ ID NO: 14508 - DNA, 80 bp, synthetic construct
  misc_feature 1..80: note = Synthetic: >Sk512R-cand-3810-3889
  source 1..80: mol_type = other DNA
ggtccaggtgttagagtgtacgaaaatgccatttttcgtttcacaccgcttaagactgcattccccatgggacgttgttt

SEQ ID NO: 14509 - DNA, 80 bp, synthetic construct
  misc_feature 1..80: note = Synthetic: >Sb512-cand-3820-3899
  source 1..80: mol_type = other DNA
ccaggtgttagagtgtacgaaaatgccatttttcgttttacaccgcttaagactgcattccccatgggacgttgtttaat

SEQ ID NO: 14510 - DNA, 80 bp, synthetic construct
  misc_feature 1..80: note = Synthetic: >Sb512-cand-18920-18999
  source 1..80: mol_type = other DNA
tgccaagcgtaaagtaggtttgacgccacccttaaccatattgaaaaatttaggtgttgtttgcaccagtaaatgtgttt

SEQ ID NO: 14511 - DNA, 80 bp, synthetic construct
  misc_feature 1..80: note = Synthetic: >BtSk_AlphaCoV-cand-18870-18949
  source 1..80: mol_type = other DNA
atacgccaagcgtaaagtaggtttgacgccacccttaaccatattgaaaaatttaggtgttgtttgcaccagtaaatgtg

SEQ ID NO: 14512 - DNA, 80 bp, synthetic construct
  misc_feature 1..80: note = Synthetic: >HKU23-cand-25460-25539
  source 1..80: mol_type = other DNA
aattttgcatggtgttaatagtggtactacttgttctaccgatttacaaaaagctaacacagacataattcttggtgttt

SEQ ID NO: 14513 - DNA, 80 bp, synthetic construct
  misc_feature 1..80: note = Synthetic: >HKU14-cand-25620-25699
  source 1..80: mol_type = other DNA
ttgcatggtgttaatagtggtactacttgttctactgatttacaaaaagctaacacagatataattgttggtgtttgtgt

SEQ ID NO: 14514 - DNA, 80 bp, synthetic construct
  misc_feature 1..80: note = Synthetic: >HKU4R-cand-11550-11629
  source 1..80: mol_type = other DNA
gggaccacagtagtcccataacctatcttatgtttataactacgttgactagtgattacacaattactgtttttgctacc

SEQ ID NO: 14515 - DNA, 80 bp, synthetic construct
  misc_feature 1..80: note = Synthetic: >BtRl_BetaCoV-cand-640-719
  source 1..80: mol_type = other DNA
aagggagctggtggtcatagctacggcatcgatctaaagtcttatgacttaggtgacgagcttggcactgatcccattga

SEQ ID NO: 14516 - DNA, 80 bp, synthetic construct
  misc_feature 1..80: note = Synthetic: >BetaSp-cand-28940-29019
  source 1..80: mol_type = other DNA
ataaaagacccatagtgggttattcttttgtagataataaatcgtggtgccgtaatcaaggtaaagttcttgcaaccctt

SEQ ID NO: 14517 - DNA, 80 bp, synthetic construct
  misc_feature 1..80: note = Synthetic: >HghCoV1-cand-16930-17009
  source 1..80: mol_type = other DNA
aaggtacaactcggagaatatgtctttgagcgtgtagactatagtgaaactgtcacttataagtcaagcactacttataa

SEQ ID NO: 14518 - DNA, 80 bp, synthetic construct
  misc_feature 1..80: note = Synthetic: >HKU4R-cand-4360-4439
  source 1..80: mol_type = other DNA
caaaggtgtggatactactaagaaaattcaaacagttgatggtgttagctattatttatatagtgctagagatgccttga

SEQ ID NO: 14519 - DNA, 80 bp, synthetic construct
  misc_feature 1..80: note = Synthetic: >MbCoV1-cand-19300-19379
  source 1..80: mol_type = other DNA
tatagcttttgaactctatgctaagcgtaagattggtaactctccttcacttactgtgcttagaaacttgggtgttactt

SEQ ID NO: 14520 - DNA, 80 bp, synthetic construct
  misc_feature 1..80: note = Synthetic: >MsbCoV1-cand-19280-19359
  source 1..80: mol_type = other DNA
taccgacaaatatagcttttgaactctatgctaagcgtaagattggtaactctccttcacttactgtgcttagaaatttg

SEQ ID NO: 14521 - DNA, 80 bp, synthetic construct
  misc_feature 1..80: note = Synthetic: >BtRf_AlphaCoV-cand-13270-13349
  source 1..80: mol_type = other DNA
ggaacaaggatattaatacccataattcccgccttagtatgactgatttgttacagtttgttacagatcctggcttactt

SEQ ID NO: 14522 - DNA, 80 bp, synthetic construct
  misc_feature 1..80: note = Synthetic: >HKU5R-cand-11590-11669
  source 1..80: mol_type = other DNA
tccgtagactctacagacctaatgcctcaaatttggctttagccctaggtagtgccatggtttggttctacacttatact

SEQ ID NO: 14523 - DNA, 80 bp, synthetic construct
  misc_feature 1..80: note = Synthetic: >HKU5R-cand-16720-16799
  source 1..80: mol_type = other DNA
ctgtgcaaacggccttgtgtttggtttgtacaagaatatgtgcactggtagcccatctgttacagaatttaacagactag

SEQ ID NO: 14524 - DNA, 80 bp, synthetic construct
  misc_feature 1..80: note = Synthetic: >MsbCoV1-cand-19840-19919
  source 1..80: mol_type = other DNA
actcttggtggtcttcatttgctcatatcccaagtacgtttaagcaaaatgggtgttcttaaagttgaagactttgtctc

SEQ ID NO: 14525 - DNA, 80 bp, synthetic construct
  misc_feature 1..80: note = Synthetic: >MbCoV1-cand-19860-19939
  source 1..80: mol_type = other DNA
gtcttcatttgctcatatcccaagtacgtttaagcaaaatgggtgttcttaaagttgaagactttgtctcgtctgctgat

SEQ ID NO: 14526 - DNA, 80 bp, synthetic construct
  misc_feature 1..80: note = Synthetic: >SARSCoV-cand-29580-29659
  source 1..80: mol_type = other DNA
actcttgtgcagaatgaattctcgtaactaaacagcacaagtaggtttagttaactttaatctcacatagcaatctttaa

SEQ ID NO: 14527 - DNA, 80 bp, synthetic construct
  misc_feature 1..80: note = Synthetic: >BM48_31-cand-28990-29069
  source 1..80: mol_type = other DNA
tgtgcagaatgaattctcgtagctaaacagcacaagtaggtttagttaactttaatctcacatagcaatctttaatcaat

SEQ ID NO: 14528 - DNA, 80 bp, synthetic construct
  misc_feature 1..80: note = Synthetic: >MbCoV1-cand-24610-24689
  source 1..80: mol_type = other DNA
aggttttatttcaaaagcctgatactgatcagtatctaatcacaccaaggcttctttttgaaccacgagttcctgtcagt

SEQ ID NO: 14529 - DNA, 80 bp, synthetic construct
  misc_feature 1..80: note = Synthetic: >MsbCoV1-cand-24600-24679
  source 1..80: mol_type = other DNA
atgaggttttgtttcaaaagcctggtactgatcagtatttaatcacaccaaggcttctttttgaaccacgagttcctgtc

SEQ ID NO: 14530 - DNA, 80 bp, synthetic construct
  misc_feature 1..80: note = Synthetic: >BtRf_AlphaCoV-cand-18570-18649
  source 1..80: mol_type = other DNA
atgggtgttgttgctacacatggtttcgtgttatgggactatgatgctgacagacccttttctaattttactaaatcagt

SEQ ID NO: 14531 - DNA, 80 bp, synthetic construct
  misc_feature 1..80: note = Synthetic: >SEAC-cand-18760-18839
  source 1..80: mol_type = other DNA
tgaaaaatatgggtgttgttgctacacatggtttcgtgttatgggactatgatgctgacagacccttttctaattttact

SEQ ID NO: 14532 - DNA, 80 bp, synthetic construct
  misc_feature 1..80: note = Synthetic: >HghCoV1-cand-17410-17489
  source 1..80: mol_type = other DNA
actgctcagtatgttttttccacaattaatgcattaccagaaactacagctgatattttggttgttgatgaagttagcat

SEQ ID NO: 14533 - DNA, 80 bp, synthetic construct
  misc_feature 1..80: note = Synthetic: >HKU4R-cand-3320-3399
  source 1..80: mol_type = other DNA
gtaggtgaaagcatctcagatgagttgtgtgtagttgaaacagctgaagcacaagaaccaagtgtagagtcaatagactc

SEQ ID NO: 14534 - DNA, 80 bp, synthetic construct
  misc_feature 1..80: note = Synthetic: >HKU10R-cand-14630-14709
  source 1..80: mol_type = other DNA
aggtgatgcatctacagcctatgctaactcagtctttaacatttttcaggcagtcagttctaacattaacagattgttga

SEQ ID NO: 14535 - DNA, 80 bp, synthetic construct
  misc_feature 1..80: note = Synthetic: >Delta-cand-13830-13909
  source 1..80: mol_type = other DNA
tgtgttgtttgctatgtgtatacctaatacggcatttggcaatctttgttcaagagctactgttgatggccaccttgtgg

SEQ ID NO: 14536 - DNA, 80 bp, synthetic construct
  misc_feature 1..80: note = Synthetic: >HKU4R-cand-13390-13469
  source 1..80: mol_type = other DNA
aggtgtctgtaaatataaaacgcgttttgtacaaatcccagcgcacatacgtgaccctgtgggatttttacttaaaaacg

SEQ ID NO: 14537 - DNA, 80 bp, synthetic construct
  misc_feature 1..80: note = Synthetic: >BtRl_BetaCoV-cand-11400-11479
  source 1..80: mol_type = other DNA
gactatcatgttcttagctagagctatagtgtttgtgtgtgttgagtattacccattgttatttattactggcaacacct

SEQ ID NO: 14538 - DNA, 80 bp, synthetic construct
  misc_feature 1..80: note = Synthetic: >WIV16-cand-11430-11509
  source 1..80: mol_type = other DNA
tcgtcacgactatcatgtttttagctagagctatagtgtttgtgtgtgttgagtattacccattgttatttattactggc

SEQ ID NO: 14539 - DNA, 80 bp, synthetic construct
  misc_feature 1..80: note = Synthetic: >HghCoV1-cand-360-439
  source 1..80: mol_type = other DNA
ttacagctctttcaccttggttcatggatggcatgttagcctatgaaaccgtgaaggaaatgcttttaaaaggagaacaa

SEQ ID NO: 14540 - DNA, 80 bp, synthetic construct
  misc_feature 1..80: note = Synthetic: >HKU4R-cand-11710-11789
  source 1..80: mol_type = other DNA
tgtgttattaatatacctgggtttagggtatatgtgtacaatgtactttggtgtcttttcattattgaacctgaaattgc

SEQ ID NO: 14541 - DNA, 80 bp, synthetic construct
  misc_feature 1..80: note = Synthetic: >SEAC-cand-23640-23719
  source 1..80: mol_type = other DNA
aggttgagaaattccagcgctatgttaattatgtcaaatgggcttggtggcagtggctgcttatatttattgctctaaca

SEQ ID NO: 14542 - DNA, 80 bp, synthetic construct
  misc_feature 1..80: note = Synthetic: >MbCoV1-cand-7450-7529
  source 1..80: mol_type = other DNA
cttatggacctggcaacacttttattaatgagactgtggcacgtgagctttccaatgttgttaaaactaacgtacaacct

SEQ ID NO: 14543 - DNA, 80 bp, synthetic construct
  misc_feature 1..80: note = Synthetic: >HKU5R-cand-1290-1369
  source 1..80: mol_type = other DNA
tgcacgagctgtggtaaaggtagttggctgactggcaatgctgtgcaaggttttgcatgtgattgcggagcacattattg

SEQ ID NO: 14544 - DNA, 80 bp, synthetic construct
  misc_feature 1..80: note = Synthetic: >MbCoV1-cand-20820-20899
  source 1..80: mol_type = other DNA
ttgacggtaacgtgttacatgctaattacatattttggagaaattctacagtaatggcaatgtcttataatagtgtattg

SEQ ID NO: 14545 - DNA, 80 bp, synthetic construct
  misc_feature 1..80: note = Synthetic: >MsbCoV1-cand-20800-20879
  source 1..80: mol_type = other DNA
gatccgattattgacggtaacgtattacacgctaattacatattttggagaaattctacagtaatggcaatgtcttataa

SEQ ID NO: 14546 - DNA, 80 bp, synthetic construct
  misc_feature 1..80: note = Synthetic: >HKU5R-cand-20080-20159
  source 1..80: mol_type = other DNA
taagtttgtgctctgggattacgagcgtagcaacatctatggtagtgcaacaatcggtgtatgcaagtacactgatattg

SEQ ID NO: 14547 - DNA, 80 bp, synthetic construct
  misc_feature 1..80: note = Synthetic: >MsbCoV1-cand-5530-5609
  source 1..80: mol_type = other DNA
ttcagtttgttcttttagtacacttgacatgcacaagcgtttgttgaacttgtttagcaaattctgtgtagacaatattg

SEQ ID NO: 14548 - DNA, 80 bp, synthetic construct
  misc_feature 1..80: note = Synthetic: >MbCoV1-cand-5530-5609
  source 1..80: mol_type = other DNA
ttaagggttcttcagtttgttcttttagtacacttgacatgcacaagcgtttgttgaacttgtttaacaaattctgtgta

SEQ ID NO: 14549 - DNA, 80 bp, synthetic construct
  misc_feature 1..80: note = Synthetic: >BtRf_AlphaCoV-cand-17690-17769
  source 1..80: mol_type = other DNA
caatgagaatgccattaataagagtggacggatagttcagtctcatattatgaaggctgccttgaaggtgtataatccta

SEQ ID NO: 14550 - DNA, 80 bp, synthetic construct
  misc_feature 1..80: note = Synthetic: >SEAC-cand-17880-17959
  source 1..80: mol_type = other DNA
tttattgccaatgagaatgccattaataagagtggacgaatagttcagtctcatattatgaaggctgccttgaaggtgta

SEQ ID NO: 14551 - DNA, 80 bp, synthetic construct
  misc_feature 1..80: note = Synthetic: >MsbCoV1-cand-18000-18079
  source 1..80: mol_type = other DNA
tccacctggtgaacagttcgcacatcttattccattaatgcgtaaaggacaaccatggagtgttgttcgaaaacgcattg

SEQ ID NO: 14552 - DNA, 80 bp, synthetic construct
  misc_feature 1..80: note = Synthetic: >MbCoV1-cand-18020-18099
  source 1..80: mol_type = other DNA
gaacagttcgcacatcttattcaactaatgcgtaaaggacaaccatggagtgttgttcgaaaacgcattgtacagatgtg

SEQ ID NO: 14553 - DNA, 80 bp, synthetic construct
  misc_feature 1..80: note = Synthetic: >HKU5R-cand-170-249
  source 1..80: mol_type = other DNA
caattaaaactgaataatatttttcagttagagcatcgtgtctcaagtgcttcacggtcacaatataccgtttcgtcggg

SEQ ID NO: 14554 - DNA, 80 bp, synthetic construct
  misc_feature 1..80: note = Synthetic: >Sb512-cand-5180-5259
  source 1..80: mol_type = other DNA
ttgttgacacactgtttgaggctaaacctgttcaggttgttgttactcaagaccagcgtagttttcatactgtggaattg

SEQ ID NO: 14555 - DNA, 80 bp, synthetic construct
  misc_feature 1..80: note = Synthetic: >MsbCoV1-cand-6730-6809
  source 1..80: mol_type = other DNA
tagtagaagcttaaaatataacttgaaggctgctcaacatgtgttgcgtcgtaaacagacgtatgttaagagattcttta

SEQ ID NO: 14556 - DNA, 80 bp, synthetic construct
  misc_feature 1..80: note = Synthetic: >HKU4R-cand-2120-2199
  source 1..80: mol_type = other DNA
tacttcgtactccgttatttggatgagaagtttgatacagttcttggtactgttagtagtgcatgtcaaactgccttgag

SEQ ID NO: 14557 - DNA, 80 bp, synthetic construct
  misc_feature 1..80: note = Synthetic: >AlphaMink-cand-27620-27699
  source 1..80: mol_type = other DNA
ctcaatttaactacactaactaacgtgcttgatatagccgatagtggtgtgaaggttaaatattttcaattgttaaaacc

SEQ ID NO: 14558 - DNA, 80 bp, synthetic construct
  misc_feature 1..80: note = Synthetic: >Alpha2-cand-27610-27689
  source 1..80: mol_type = other DNA
tctcaatttaactacactaactaacgtgcttgatatagccgatagtggtgtgaaggttaaatattttcaattattaaaac

SEQ ID NO: 14559 - DNA, 80 bp, synthetic construct
  misc_feature 1..80: note = Synthetic: >HKU5R-cand-15510-15589
  source 1..80: mol_type = other DNA
ctcacttgatgggttgggattaccctaagtgtgatcgcgctatgcctaatatgtgcagaatctttgcatctctcatatta

SEQ ID NO: 14560 - DNA, 80 bp, synthetic construct
  misc_feature 1..80: note = Synthetic: >Sb512-cand-17700-17779
  source 1..80: mol_type = other DNA
tgtagtgattatcttgctaatttgtcagatacactcatatttgttctttggtctggtggtttggaactcactacaatgag

SEQ ID NO: 14561 - DNA, 80 bp, synthetic construct
  misc_feature 1..80: note = Synthetic: >MbCoV1-cand-28120-28199
  source 1..80: mol_type = other DNA
ttaagcagtataagcaatacttaaatatattactgcccttagatcaaagctatatgcattagtacctctatgttctggag

SEQ ID NO: 14562 - DNA, 80 bp, synthetic construct
  misc_feature 1..80: note = Synthetic: >MsbCoV1-cand-28120-28199
  source 1..80: mol_type = other DNA
gtataagcaatacttaaatatattactgcccttagatcaaagctatatgcattagtacctctatgttctggagtaatcaa

SEQ ID NO: 14563 - DNA, 80 bp, synthetic construct
  misc_feature 1..80: note = Synthetic: >HKU17-cand-24160-24239
  source 1..80: mol_type = other DNA
gtacccactactgacgcgtcgtggttccaggtgctcaaagctcaaaacaaaaaggctactcatcctcagtttcgtggcaa

SEQ ID NO: 14564 - DNA, 80 bp, synthetic construct
  misc_feature 1..80: note = Synthetic: >WIV16-cand-30200-30279
  source 1..80: mol_type = other DNA
tgcctatatggaagagccctaatgtgtaaaattaattttagtagtgctatccccatgtgattttaatagcttcttaggag

SEQ ID NO: 14565 - DNA, 80 bp, synthetic construct
  misc_feature 1..80: note = Synthetic: >MT114540-cand-23760-23839
  source 1..80: mol_type = other DNA
agcaccaaatggcatgatcttctttcacacagtgctattaccaacagcttatgaaactgtaacagcttggtcaggtattt

SEQ ID NO: 14566 - DNA, 80 bp, synthetic construct
  misc_feature 1..80: note = Synthetic: >MT114543-cand-21000-21079
  source 1..80: mol_type = other DNA
aaattatgaatattgcactggctacgccactaacgtctttgccccaactgtgggaggttatatacctgacggattcagtt

SEQ ID NO: 14567 - DNA, 80 bp, synthetic construct
  misc_feature 1..80: note = Synthetic: >MT114543-cand-22120-22199
  source 1..80: mol_type = other DNA
aacaagttctgtttgtcgttgaatcctactggtgccaactgtaagtttgatgttgctgcccgtactcgaaccaacgagca

SEQ ID NO: 14568 - DNA, 80 bp, synthetic construct
  misc_feature 1..80: note = Synthetic: >MN517816-cand-10330-10409
  source 1..80: mol_type = other DNA
tgggaattattctttgaattagttcatactactgttttggctaatattagtagcaactctttagttggtttaattgtgtt

SEQ ID NO: 14569 - DNA, 80 bp, synthetic construct
  misc_feature 1..80: note = Synthetic: >AY692454-cand-14730-14809
  source 1..80: mol_type = other DNA
ggttgaaccagatttagaaaaaggcccacatgagttttgttcacaacacacaatgctagtggaggttgatggtgagccta

SEQ ID NO: 14570 - DNA, 80 bp, synthetic construct
  misc_feature 1..80: note = Synthetic: >MN128086-cand-20890-20969
  source 1..80: mol_type = other DNA
tttcagtgtgttaataatttaacatctgtctatttgaatggtgaccttgtttacacttctaatgagaccacagacgttac

SEQ ID NO: 14571 - DNA, 80 bp, synthetic construct
  misc_feature 1..80: note = Synthetic: >MN531554-cand-10010-10089
  source 1..80: mol_type = other DNA
tggcatatatggatactttcttattgccgacattgcttacagttattattggagtttgtgctgaagtacctctcatctac

SEQ ID NO: 14572 - DNA, 80 bp, synthetic construct
  misc_feature 1..80: note = Synthetic: >MT114541-cand-21440-21519
  source 1..80: mol_type = other DNA
tctttagcacttttcctattgattgtatatcttttaacttgaccactggtgctagtggagctttctggacaattgcctac

SEQ ID NO: 14573 - DNA, 80 bp, synthetic construct
  misc_feature 1..80: note = Synthetic: >MT114542-cand-18230-18309
  source 1..80: mol_type = other DNA
tggcatggttttgttaatagcaaagcactccagagtctagaaaatgtggcttttaatgtcgttaaaaaaggtgcattcac

SEQ ID NO: 14574 - DNA, 80 bp, synthetic construct
  misc_feature 1..80: note = Synthetic: >MT040336-cand-23540-23619
  source 1..80: mol_type = other DNA
gtgcaagttaccattccatgtcatcatttcgtagtgtcaaccagcgttcaatcattgcttacactatgtctttaggtgca

SEQ ID NO: 14575 - DNA, 80 bp, synthetic construct
  misc_feature 1..80: note = Synthetic: >LC061273-cand-1200-1279
  source 1..80: mol_type = other DNA
gttatacaagagccagtacatgtttatgctgctgattctattatccttcggctacctaagttagttgacattatggatca

SEQ ID NO: 14576 - DNA, 80 bp, synthetic construct
  misc_feature 1..80: note = Synthetic: >MT114539-cand-9310-9389
  source 1..80: mol_type = other DNA
gttatgaagatcaacctagcatgcaattggaaggtactaatgtcatgtcatcagataatgtggttgcatttttgtatgca

SEQ ID NO: 14577 - DNA, 80 bp, synthetic construct
  misc_feature 1..80: note = Synthetic: >MT114541-cand-27360-27439
  source 1..80: mol_type = other DNA
tctaaatccaaggaacgtagcaactctaagacaagagacactacacctaagaatgaaaacaaacacacctggaagagaac

SEQ ID NO: 14578 - DNA, 80 bp, synthetic construct
  misc_feature 1..80: note = Synthetic: >SBB-797-cand-10640-10719
  source 1..80: mol_type = other DNA
gtgtgcagggttatttgttaagtttgtacaattatgttaacccgggtagggttgacattattggtacggacatcgttaca

SEQ ID NO: 14579 - DNA, 80 bp, synthetic construct
  misc_feature 1..80: note = Synthetic: >SBB-010-cand-24160-24239
  source 1..80: mol_type = other DNA
actctgttatgtgagctattgggccatacgttacagatcttgggctttcattttgctgaacacagacagagtggcttttg

SEQ ID NO: 14580 - DNA, 80 bp, synthetic construct
  misc_feature 1..80: note = Synthetic: >SBB-053-cand-24150-24229
  source 1..80: mol_type = other DNA
gttatgtgagctattgggccatacgttacagatcttgggctttcattttgctgaactcagacagagtggcttttgtcaat

SEQ ID NO: 14581 - DNA, 80 bp, synthetic construct
  misc_feature 1..80: note = Synthetic: >SBB-747-cand-2870-2949
  source 1..80: mol_type = other DNA
ccgttcccgtcgaagatgacgattcggctgttgatgacactattgtgtcggaccataactctgaacccacttctgacagt

SEQ ID NO: 14582 - DNA, 80 bp, synthetic construct
  misc_feature 1..80: note = Synthetic: >SBB-788-cand-2880-2959
  source 1..80: mol_type = other DNA
cgaagacgacgattcggctgttgatgacactattgtggcagaccataactctgaacccacttctgacagtgatgatcagt

SEQ ID NO: 14583 - DNA, 80 bp, synthetic construct
  misc_feature 1..80: note = Synthetic: >SBB-726-cand-2880-2959
  source 1..80: mol_type = other DNA
cgaagatgatgatttggctgttgacgacactattgtgtcagaccataactctgaacccacttctgacagtgatgatcagt

SEQ ID NO: 14584 - DNA, 80 bp, synthetic construct
  misc_feature 1..80: note = Synthetic: >SBB-747-cand-710-789
  source 1..80: mol_type = other DNA
actgttgtcctacgaagcctaaggctaagcgtgggggcaatgtctacatgtcagaccagtatggatttgacaacaatgga

SEQ ID NO: 14585 - DNA, 80 bp, synthetic construct
  misc_feature 1..80: note = Synthetic: >SBB-726-cand-720-799
  source 1..80: mol_type = other DNA
tacgaagcctaaggctaagcgtgggggcaatgtgtacatgtcagaccagtatggatttgacaacaatggagtcctagtga

SEQ ID NO: 14586 - DNA, 80 bp, synthetic construct
  misc_feature 1..80: note = Synthetic: >SBB-788-cand-720-799
  source 1..80: mol_type = other DNA
agcgaagcctaaagctaagcgaggcggcaacgcatatatgtcagaccagtatggatttgacaacaatggagtcctagtga

SEQ ID NO: 14587 - DNA, 80 bp, synthetic construct
  misc_feature 1..80: note = Synthetic: >SBB-024-cand-8790-8869
  source 1..80: mol_type = other DNA
agcttaaagttactactcagttgtttgatggtgataagtttgtaggtaattttgagagtgctgcgtcaggcacttttgtg

SEQ ID NO: 14588 - DNA, 80 bp, synthetic construct
  misc_feature 1..80: note = Synthetic: >SBB-010-cand-2190-2269
  source 1..80: mol_type = other DNA
ttaaagtcatgggtggtaagtgtgttgtgacttgtagctacaatttccgtgcacctagttacatccaagatacagaagct

SEQ ID NO: 14589 - DNA, 80 bp, synthetic construct
  misc_feature 1..80: note = Synthetic: >SBB-053-cand-2200-2279
  source 1..80: mol_type = other DNA
gggtggtaagtgtgttgtgacttgtagctacaatttccgtgcacctagttacattcaagatacagaagcttttattgctg

SEQ ID NO: 14590 - DNA, 80 bp, synthetic construct
  misc_feature 1..80: note = Synthetic: >SBB-041-cand-5870-5949
  source 1..80: mol_type = other DNA
gtagcaacagaaacttctgcccctgctcttacagcacacaacaaaaagacaattgaattacagaaagttgttgaaaagct

SEQ ID NO: 14591 - DNA, 80 bp, synthetic construct
  misc_feature 1..80: note = Synthetic: >SBB-130-cand-5860-5939
  source 1..80: mol_type = other DNA
atcactagtagcaacagaaacttctgcccctgctcctacatcacacaataaaaagacaattgaattacagaaagttgttg

SEQ ID NO: 14592 - DNA, 80 bp, synthetic construct
  misc_feature 1..80: note = Synthetic: >SBB-788-cand-11120-11199
  source 1..80: mol_type = other DNA
aggaactacgttatatgaattcacatggcctattgccaccaactacgtcatggcaggcgcttatgcttaatgttaaatta

SEQ ID NO: 14593 - DNA, 80 bp, synthetic construct
  misc_feature 1..80: note = Synthetic: >SBB-726-cand-11110-11189
  source 1..80: mol_type = other DNA
gttagttcgcaggaactacgttatatgaattcacatggcctattgccaccaactacgtcatggcaggcactcatgcttaa

SEQ ID NO: 14594 - DNA, 80 bp, synthetic construct
  misc_feature 1..80: note = Synthetic: >SBB-041-cand-15950-16029
  source 1..80: mol_type = other DNA
ttagtgaagcttattccacacttgtgccatactaccagatgataggcaaacagaggattactacaatccaaggcccgcct

SEQ ID NO: 14595 - DNA, 80 bp, synthetic construct
  misc_feature 1..80: note = Synthetic: >PDF-2386-cand-12000-12079
  source 1..80: mol_type = other DNA
aggcatatgaacaggctgttgcaaatggcgattctgaagtcgttcttaaaaagttgaagaaatctttgaatgtggctaaa

SEQ ID NO: 14596 - DNA, 80 bp, synthetic construct
  misc_feature 1..80: note = Synthetic: >PDF-2386-cand-18880-18959
  source 1..80: mol_type = other DNA
gacattggtaatccaaaggctataaaatgtgtgccacaagctgacgtagattggaagttctacgatgcacagccttgtag

SEQ ID NO: 14597 - DNA, 80 bp, synthetic construct
  misc_feature 1..80: note = Synthetic: >PDF-2370-cand-1840-1919
  source 1..80: mol_type = other DNA
agttcttgctcctctatgtgccttcccttctcaagctgctagtgtggtcagatctatattctcacgcacactagaaacag

SEQ ID NO: 14598 - DNA, 80 bp, synthetic construct
  misc_feature 1..80: note = Synthetic: >SBB-797-cand-25120-25199
  source 1..80: mol_type = other DNA
ttgctgttgttaagacaacatgtgataggtacgtatttccagttgattcttctcatgataatttggttgtacttacaact

SEQ ID NO: 14599 - DNA, 80 bp, synthetic construct
  misc_feature 1..80: note = Synthetic: >SBB-726-cand-25120-25199
  source 1..80: mol_type = other DNA
attttgctgttgttaagacaacgtgtgataggtacgtatttccagttgattcttctcatgataatttggttgtacttaca

SEQ ID NO: 14600 - DNA, 80 bp, synthetic construct
  misc_feature 1..80: note = Synthetic: >SBB-797-cand-16800-16879
  source 1..80: mol_type = other DNA
ataaatgcaagagttcgcgctaagcatattgtttatgttggcgatcctgcgcagctacctgcacctagaacccttcttac

SEQ ID NO: 14601 - DNA, 80 bp, synthetic construct
  misc_feature 1..80: note = Synthetic: >SBB-747-cand-16790-16869
  source 1..80: mol_type = other DNA
tctaagtatgataaatgcaagagttcgcgctaagcatattgtttatgttggcgatcctgcacagttacccgcacctagaa

SEQ ID NO: 14602 - DNA, 80 bp, synthetic construct
  misc_feature 1..80: note = Synthetic: >SBB-122-cand-15710-15789
  source 1..80: mol_type = other DNA
atagtgtctttacatgcttccagattacgaaagatgccaagtttcaagttggcgagttcgtgtttgagaagttggattat

SEQ ID NO: 14603 - DNA, 80 bp, synthetic construct
  misc_feature 1..80: note = Synthetic: >SBB-041-cand-15710-15789
  source 1..80: mol_type = other DNA
atagtgtctttacatgcttccagattacgaaggacgccaagtttcaggttggcgaattcgtgtttgagaaactagattat

SEQ ID NO: 14604 - DNA, 80 bp, synthetic construct
  misc_feature 1..80: note = Synthetic: >SBB-010-cand-12360-12439
  source 1..80: mol_type = other DNA
ataatggctgtacatgtgatagaacttctatccaagcatttgacagcggttatttaaacgagcaaggggctctagtgctg

SEQ ID NO: 14605 - DNA, 80 bp, synthetic construct
  misc_feature 1..80: note = Synthetic: >SBB-041-cand-12350-12429
  source 1..80: mol_type = other DNA
tgttggttgaataatggctgtacatgtgatagaacttctatccaagcatttgacagcggttatttaaacgagcaaggggc

SEQ ID NO: 14606 - DNA, 80 bp, synthetic construct
  misc_feature 1..80: note = Synthetic: >PRD-0038-cand-20230-20309
  source 1..80: mol_type = other DNA
ctcgctaaacgttcttccgtttcaccactcaagttggaggattttctacctatggacagtacagtgaaaaattatttcat

SEQ ID NO: 14607 - DNA, 80 bp, synthetic construct
  misc_feature 1..80: note = Synthetic: >PDF-2386-cand-20240-20319
  source 1..80: mol_type = other DNA
gttcttctgtttcaccactcaagttggaggattttctacctatggacagtacagtgaaaaattatttcataacagatgta

SEQ ID NO: 14608 - DNA, 80 bp, synthetic construct
  misc_feature 1..80: note = Synthetic: >SBB-053-cand-26780-26859
  source 1..80: mol_type = other DNA
gtaaatgatgttattttcacttctaatgatgtctgctggctaacccatccagacttcatctacatctgcctaatcttcat

SEQ ID NO: 14609 - DNA, 80 bp, synthetic construct
  misc_feature 1..80: note = Synthetic: >SBB-130-cand-26790-26869
  source 1..80: mol_type = other DNA
gtgtaaatgatgttattttcacttctaatgatgtctgctggctaacccatccagacttcatctacatctgcctaatcttc

SEQ ID NO: 14610 - DNA, 80 bp, synthetic construct
  misc_feature 1..80: note = Synthetic: >SBB-726-cand-19780-19859
  source 1..80: mol_type = other DNA
gtaaacgtactgcaaatttagtaatggaaactgtgttaggtactgacacagtgacagcatatgccgtcatagaccagcca

SEQ ID NO: 14611 - DNA, 80 bp, synthetic construct
  misc_feature 1..80: note = Synthetic: >SBB-788-cand-19770-19849
  source 1..80: mol_type = other DNA
gcagtgcggcgtaaacgtactgcaaatttagtaatggaaactgtgttaggtactgatacagtgacagcatatgccgtcat

SEQ ID NO: 14612 - DNA, 80 bp, synthetic construct
  misc_feature 1..80: note = Synthetic: >SBB-120-cand-8390-8469
  source 1..80: mol_type = other DNA
ggtttgttttctcttatttacaattttattgtaatgttctcaatgcccttcactataatggcaatgtcaggtcaagtcat

SEQ ID NO: 14613 - DNA, 80 bp, synthetic construct
  misc_feature 1..80: note = Synthetic: >SBB-726-cand-20570-20649
  source 1..80: mol_type = other DNA
atggagtgcagatttgtatgccatgatgggccattttgaatggtggacatgtttttgtactgccgttaatagttcctcat

SEQ ID NO: 14614 - DNA, 80 bp, synthetic construct
  misc_feature 1..80: note = Synthetic: >SBB-010-cand-13400-13479
  source 1..80: mol_type = other DNA
ttgctactgctggttaccattttaaacagttaggtatagtgtggaacaaagacctcaacacacattcaactcgtttgaat

SEQ ID NO: 14615 - DNA, 80 bp, synthetic construct
  misc_feature 1..80: note = Synthetic: >SBB-041-cand-13390-13469
  source 1..80: mol_type = other DNA
gtaccattagttgctactgctggttaccattttaaacagttaggtatagtttggaataaagatcttaacacacattcaac

SEQ ID NO: 14616 - DNA, 80 bp, synthetic construct
  misc_feature 1..80: note = Synthetic: >SBB-797-cand-15200-15279
  source 1..80: mol_type = other DNA
gttgtattttcagaataatgtttttatgtctgaagctaagtgttgggtagaaccggatataactaaagggcctcatgaat

SEQ ID NO: 14617 - DNA, 80 bp, synthetic construct
  misc_feature 1..80: note = Synthetic: >SBB-747-cand-15190-15269
  source 1..80: mol_type = other DNA
ttaaggagttgttgtattttcagaataatgtttttatgtctgaagctaaatgttgggtagaaccggatataactaaaggg

SEQ ID NO: 14618 - DNA, 80 bp, synthetic construct
  misc_feature 1..80: note = Synthetic: >SBB-120-cand-5310-5389
  source 1..80: mol_type = other DNA
gttggattaatgctatttgtatacagttgcaaaaagccaaggttgtttttaagtccgagggtctgcagtgcatgtggaat

SEQ ID NO: 14619 - DNA, 80 bp, synthetic construct
  misc_feature 1..80: note = Synthetic: >SBB-130-cand-5310-5389
  source 1..80: mol_type = other DNA
ggattaatgctatttgtatacagttgcaaaaagccaaggttgtttttaagtccgagggtttgcagtgcatgtggaatgac

SEQ ID NO: 14620 - DNA, 80 bp, synthetic construct
  misc_feature 1..80: note = Synthetic: >SBB-024-cand-5320-5399
  source 1..80: mol_type = other DNA
tgctatttgtatacagttgcaaaaagccaaggttgtttttaagtccgagggtttgcagtgcatgtggaatgacttcttga

SEQ ID NO: 14621 - DNA, 80 bp, synthetic construct
  misc_feature 1..80: note = Synthetic: >PRD-0038-cand-15510-15589
  source 1..80: mol_type = other DNA
attcgtgggagagttttacgcttatttgcgtaaacatttttccatgatgatcctttcagatgatgccgttgtttgctata

SEQ ID NO: 14622 - DNA, 80 bp, synthetic construct
  misc_feature 1..80: note = Synthetic: >PDF-2386-cand-15520-15599
  source 1..80: mol_type = other DNA
gagttttacgcttatttgcgtaaacatttttccatgatgatcctttcagatgatgccgttgtttgctataatagcaacta

SEQ ID NO: 14623 - DNA, 80 bp, synthetic construct
  misc_feature 1..80: note = Synthetic: >PRD-0038-cand-1760-1839
  source 1..80: mol_type = other DNA
attctggaatcttgtggtagttacaaagtaacaaagggtaaatgtaagcctggtgcttggaacattagttgtagcaagtc

SEQ ID NO: 14624 - DNA, 80 bp, synthetic construct
  misc_feature 1..80: note = Synthetic: >SBB-041-cand-1240-1319
  source 1..80: mol_type = other DNA
attgcagagtgttaatgggtttgttgcctcagctagttacaacatagatgagtacatctatttaacaaaccatatttgca

SEQ ID NO: 14625 - DNA, 80 bp, synthetic construct
  misc_feature 1..80: note = Synthetic: >PRD-0038-cand-4000-4079
  source 1..80: mol_type = other DNA
cacatgcttgattatacctaacaagtcagctggtggcacagttcatatgcttactaaagcattgcaaaatgtgccagctg

SEQ ID NO: 14626 - DNA, 80 bp, synthetic construct
  misc_feature 1..80: note = Synthetic: >SBB-726-cand-2160-2239
  source 1..80: mol_type = other DNA
cacgtctgcaaagtgggctggttgtaaggtggaagccttgtataccggcacttattattatttttcccagaatggattgc

SEQ ID NO: 14627 - DNA, 80 bp, synthetic construct
  misc_feature 1..80: note = Synthetic: >SBB-747-cand-2150-2229
  source 1..80: mol_type = other DNA
gtaagcttctcacgtctgcaaagtgggctggttgtaaggtggaagccttgtataccggcacttattattatttttcccag

SEQ ID NO: 14628 - DNA, 80 bp, synthetic construct
  misc_feature 1..80: note = Synthetic: >SBB-120-cand-6650-6729
  source 1..80: mol_type = other DNA
cacgttttgcttggttgtgataaaccttcctgtgttgcttgtgctaagagtgcacgtttgacacgcatacctatgcagac

SEQ ID NO: 14629 - DNA, 80 bp, synthetic construct
  misc_feature 1..80: note = Synthetic: >SBB-024-cand-6650-6729
  source 1..80: mol_type = other DNA
catgtcctgcttggttgtgacaaaccttcttgtgttgcttgtaccaagagtgcacgcttgacacgtatacctatgcagac

SEQ ID NO: 14630 - DNA, 80 bp, synthetic construct
  misc_feature 1..80: note = Synthetic: >PDF-2370-cand-9360-9439
  source 1..80: mol_type = other DNA
cattgctgtttctattctctttcactatactttgcttggcaccggcttatactttcttacctggtgtctactctttagtg

SEQ ID NO: 14631 - DNA, 80 bp, synthetic construct
  misc_feature 1..80: note = Synthetic: >SBB-797-cand-25360-25439
  source 1..80: mol_type = other DNA
tacagaacactcacccgaaggtgggtgtttctaatccagagttcgacgatgtcgaactataatgtatgaatttgttagtg

SEQ ID NO: 14632 - DNA, 80 bp, synthetic construct
  misc_feature 1..80: note = Synthetic: >SBB-788-cand-25360-25439
  source 1..80: mol_type = other DNA
tattacagaacactcacccgaaggtgggtgtttctaatccagagttcgacgatgtcgaactataatgtatgaatttgtta

SEQ ID NO: 14633 - DNA, 80 bp, synthetic construct
  misc_feature 1..80: note = Synthetic: >SBB-726-cand-25370-25449
  source 1..80: mol_type = other DNA
cactcaccctaaggtgggtgtttccaatccagagttcgacgatgtcgaactataatgtatgaatttgttagtgctgatac

SEQ ID NO: 14634 - DNA, 80 bp, synthetic construct
  misc_feature 1..80: note = Synthetic: >SBB-747-cand-14870-14949
  source 1..80: mol_type = other DNA
gaaacctggtggtaccagtagtggtgattccacgactgcttatgctaacagtgtttttaacatttgtcaggctgttagtg

SEQ ID NO: 14635 - DNA, 80 bp, synthetic construct
  misc_feature 1..80: note = Synthetic: >SBB-041-cand-1640-1719
  source 1..80: mol_type = other DNA
cctacgtgtttccagacgtgttttgaagtctttaaggactgtgttataggcatctttgaccttactgttaaaacagttca

SEQ ID NO: 14636 - DNA, 80 bp, synthetic construct
  misc_feature 1..80: note = Synthetic: >PDF-2386-cand-17920-17999
  source 1..80: mol_type = other DNA
tgtagtaaacttataacaggtttacaccctacacaggctactacttatcttagtgttgacactaagtttaagacagaagg

SEQ ID NO: 14637 - DNA, 80 bp, synthetic construct
  misc_feature 1..80: note = Synthetic: >PRD-0038-cand-17910-17989
  source 1..80: mol_type = other DNA
ttttaaggattgtagtaaacttataacaggtttacaccctacacaggccactacttatcttagtgttgacactaagttta

SEQ ID NO: 14638 - DNA, 80 bp, synthetic construct
  misc_feature 1..80: note = Synthetic: >SBB-726-cand-19940-20019
  source 1..80: mol_type = other DNA
gtcagtggttagtaaagtagtgcaatgctgccttgattttaagatgtttagatttatgttgtggtgtaaggatggcaagg

SEQ ID NO: 14639 - DNA, 80 bp, synthetic construct
  misc_feature 1..80: note = Synthetic: >SBB-797-cand-19930-20009
  source 1..80: mol_type = other DNA
ctcaagataggtcagtggtcagtaaagtagttcaatgctgccttgattttaagatgtttagatttatgttgtggtgtaag

SEQ ID NO: 14640 - DNA, 80 bp, synthetic construct
  misc_feature 1..80: note = Synthetic: >SBB-797-cand-20730-20809
  source 1..80: mol_type = other DNA
ttttggcgtaatagtactataatgcaattgtccgcatacagtttgtttgatgtgcaaaaatttagtttgcgctgtaaagg

SEQ ID NO: 14641 - DNA, 80 bp, synthetic construct
  misc_feature 1..80: note = Synthetic: >SBB-726-cand-20730-20809
  source 1..80: mol_type = other DNA
ttttggcgtaatagtactataatgcaattgtcttcatatagtttatttgacgtgcaaaaatttggtttgcgcgccaaagg

SEQ ID NO: 14642 - DNA, 80 bp, synthetic construct
  misc_feature 1..80: note = Synthetic: >PRD-0038-cand-14640-14719
  source 1..80: mol_type = other DNA
tagtgattatgactattatcgttataacctacctacaatgtgtgacatcagacaactactttttgtagttgaggttgtcg

SEQ ID NO: 14643 - DNA, 80 bp, synthetic construct
  misc_feature 1..80: note = Synthetic: >229E-cand-5110-5189
  source 1..80: mol_type = other DNA
ctaaagttataactataaaggtgacagaggatggtgttaatgttcatgatgtgactgtgacaacagacaagtcatttgaa

SEQ ID NO: 14644 - DNA, 80 bp, synthetic construct
  misc_feature 1..80: note = Synthetic: >229E-cand-5190-5269
  source 1..80: mol_type = other DNA
caacaagttggtgttattgctgttaaagacaaagatctttctggtgcagtaccaagcgatcttaatacatctgagttgct

SEQ ID NO: 14645 - DNA, 80 bp, synthetic construct
  misc_feature 1..80: note = Synthetic: >229E-cand-5270-5349
  source 1..80: mol_type = other DNA
tactaaggcaatagatgttgattgggttgaattttatggtttcggagacgctgttacttttgcaacagttgatcatagtg

SEQ ID NO: 14646 - DNA, 80 bp, synthetic construct
  misc_feature 1..80: note = Synthetic: >229E-cand-5350-5429
  source 1..80: mol_type = other DNA
attttgcatatgatagtgctgttgttaatggtttcagagttttgaaaaccagtgataataattgttgggtgaatgctgtg

SEQ ID NO: 14647 - DNA, 80 bp, synthetic construct
  misc_feature 1..80: note = Synthetic: >229E-cand-5430-5509
  source 1..80: mol_type = other DNA
tgtatttcactacagtatttgaaaccccactttatttcacaaggtcttgatgctgcatggaacaaatttgttttaggcga

SEQ ID NO: 14648 - DNA, 80 bp, synthetic construct
  misc_feature 1..80: note = Synthetic: >229E-cand-5510-5589
  source 1..80: mol_type = other DNA
tgttgaaacttttgtcgcatttatttactatgtagcagggttagtgaaaggtgctaagggtgatgctgaagatattttga

SEQ ID NO: 14649 - DNA, 80 bp, synthetic construct
  misc_feature 1..80: note = Synthetic: >229E-cand-5590-5669
  source 1..80: mol_type = other DNA
ataagttatctaagtatcttgctaatgaagcccaagttcaattagaacattatagttcttgtgttgaatgtgaggctaca

SEQ ID NO: 14650 - DNA, 80 bp, synthetic construct
  misc_feature 1..80: note = Synthetic: >229E-cand-5670-5749
  source 1..80: mol_type = other DNA
tttaaaaaccctgttgcatctgttaattctgctatagtttgtgctagtgtcaaacgtgatggtgtgcaagttggttattg

SEQ ID NO: 14651 - DNA, 80 bp, synthetic construct
  misc_feature 1..80: note = Synthetic: >229E-cand-5750-5829
  source 1..80: mol_type = other DNA
tgcccatggtattaagtactattcacgtgttagaagtgttagcggtagagctattatattcagtgtcgaacagcttgaac

SEQ ID NO: 14652 - DNA, 80 bp, synthetic construct
  misc_feature 1..80: note = Synthetic: >229E-cand-5830-5909
  source 1..80: mol_type = other DNA
catgttctcagtctagacttttgagtggtgttgcttacactgctttttctggacctgctgacaatggtcattatactgtt

SEQ ID NO: 14653 - DNA, 80 bp, synthetic construct
  misc_feature 1..80: note = Synthetic: >229E-cand-5910-5989
  source 1..80: mol_type = other DNA
tatgatactgcaaagaaatcaatgtatgatggtgatcgttttgtcaaacatgatctttctctgttgtctgtcacatcagt

SEQ ID NO: 14654 - DNA, 80 bp, synthetic construct
  misc_feature 1..80: note = Synthetic: >229E-cand-5990-6069
  source 1..80: mol_type = other DNA
tgttatggttggtggttatgttgcacctgttattgaaacagtgaaacctaaaccagtcattaatcaacttgatgagaagg

SEQ ID NO: 14655 - DNA, 80 bp, synthetic construct
  misc_feature 1..80: note = Synthetic: >229E-cand-6070-6149
  source 1..80: mol_type = other DNA
cacagaagttctttgattttggtgattttttggttcataattttgttacttttttcacatggttgttgagtatgtttact

SEQ ID NO: 14656 - DNA, 80 bp, synthetic construct
  misc_feature 1..80: note = Synthetic: >229E-cand-6160-6239
  source 1..80: mol_type = other DNA
ctgcagtaactacatgtgatgttaaaataatggccaaagcaccacaaaggacgggtgttgttttaaaacgtagtcttaaa

SEQ ID NO: 14657 - DNA, 80 bp, synthetic construct
  misc_feature 1..80: note = Synthetic: >229E-cand-6240-6319
  source 1..80: mol_type = other DNA
tataacttaaaagcgtcaacagctgttcttaaatctaagtggtggctgcttgctaagtttatgaaactactgttactcat

SEQ ID NO: 14658 - DNA, 80 bp, synthetic construct
  misc_feature 1..80: note = Synthetic: >229E-cand-6320-6399
  source 1..80: mol_type = other DNA
ttacacgttgtattcagtagttttgcttggtgtactttttggaccgtttaatgattatctttgtagtgagactgttaatg

SEQ ID NO: 14659 - DNA, 80 bp, synthetic construct
  misc_feature 1..80: note = Synthetic: >AlphaCoV1-cand-26260-26339
  source 1..80: mol_type = other DNA
ctatgcttatagcatttggttactacattgatggcattgttacaacaactgtcttagctttaagatttgtctacttagca

SEQ ID NO: 14660 - DNA, 80 bp, synthetic construct
  misc_feature 1..80: note = Synthetic: >AlphaCoV1-cand-26340-26419
  source 1..80: mol_type = other DNA
tacttttggtatgttaatagtaggtttgaatttattttatacaatacaacgacactcatgtttgtacatggcagagctgc

SEQ ID NO: 14661 - DNA, 80 bp, synthetic construct
  misc_feature 1..80: note = Synthetic: >AlphaCoV1-cand-26410-26489
  source 1..80: mol_type = other DNA
gcagagctgcaccgtttatgagaagttctcacagctctatttatgtcacattatatggtggcataaattatatgtttgtg

SEQ ID NO: 14662 - DNA, 80 bp, synthetic construct
  misc_feature 1..80: note = Synthetic: >AlphaCoV1-cand-26490-26569
  source 1..80: mol_type = other DNA
aatgacctcacgttgcattttgtagaccctatgcttgtaagcatagcaatacgtggcttagttcatgctgatctaactgt

SEQ ID NO: 14663 - DNA, 80 bp, synthetic construct
  misc_feature 1..80: note = Synthetic: >AlphaCoV1-cand-26570-26649
  source 1..80: mol_type = other DNA
tgttagagcagttgaacttctcaatggtgattttatttatatattttcacaggagcccgtagtcggtgtttacaatgcag

SEQ ID NO: 14664 - DNA, 80 bp, synthetic construct
  misc_feature 1..80: note = Synthetic: >AlphaCoV1-cand-26650-26729
  source 1..80: mol_type = other DNA
ccttttctcaggcggttctaaacgaaattgacttaaaagaagaagaagaagaccgtatctatgacgtttcctagggcatt

SEQ ID NO: 14665 - DNA, 80 bp, synthetic construct
  misc_feature 1..80: note = Synthetic: >AlphaCoV1-cand-26730-26809
  source 1..80: mol_type = other DNA
tactatcatagatgaccatggaatggtcgttagcgtcttcttctggctcctgttgataattatattgatattgttttcaa

SEQ ID NO: 14666 - DNA, 80 bp, synthetic construct
  misc_feature 1..80: note = Synthetic: >AlphaCoV1-cand-26810-26889
  source 1..80: mol_type = other DNA
tagcattgctaaatgttattaagttatgcatggtgtgttgcaatttaggtaagactattatagtagtacctgcgcgccat

SEQ ID NO: 14667 - DNA, 80 bp, synthetic construct
  misc_feature 1..80: note = Synthetic: >AlphaCoV1-cand-26890-26969
  source 1..80: mol_type = other DNA
gcatatgatgcctataagaattttatgcaaattaaggcatataaccccgatgaagcattcttggttgtttaactgaacta

SEQ ID NO: 14668 - DNA, 80 bp, synthetic construct
  misc_feature 1..80: note = Synthetic: >AlphaCoV1-cand-26970-27049
  source 1..80: mol_type = other DNA
aacaaaatgaagtacattttgttaatattcgcgtgcataattgcatgcgtgataccaaccacccctgttgtggagaacaa

SEQ ID NO: 14669 - DNA, 80 bp, synthetic construct
  misc_feature 1..80: note = Synthetic: >AlphaCoV1-cand-27050-27129
  source 1..80: mol_type = other DNA
ataagctattgtgctatgcaaacaacttccgatacaggtttgacatgtaactgtctcaatggcacagagtccaatgaatg

SEQ ID NO: 14670 - DNA, 80 bp, synthetic construct
  misc_feature 1..80: note = Synthetic: >AlphaCoV1-cand-27130-27209
  source 1..80: mol_type = other DNA
tcaaacatgcttcgaacgtggtgatcttatttggcatcttgctaactggaacttcagctggtctgtaatattgatcgttt

SEQ ID NO: 14671 - DNA, 80 bp, synthetic construct
  misc_feature 1..80: note = Synthetic: >AlphaCoV1-cand-27210-27289
  source 1..80: mol_type = other DNA
ttataacagtgctacaatatggaagacctcaatttagctggctcgtttatggcattaaaatgctgatcatgtggctatta

SEQ ID NO: 14672 - DNA, 80 bp, synthetic construct
  misc_feature 1..80: note = Synthetic: >AlphaCoV1-cand-27290-27369
  source 1..80: mol_type = other DNA
tggcccattgttctagctcttacgatttttaatgcatactcggagtaccaagtttccagatatgtaatgttcggctttag

SEQ ID NO: 14673 - DNA, 80 bp, synthetic construct
  misc_feature 1..80: note = Synthetic: >AlphaCoV1-cand-27370-27449
  source 1..80: mol_type = other DNA
tgttgcaggtgcagttgtaacgtttgcactctggatgatgtattttgtgagatccattcagctatatagaaggaccaaat

SEQ ID NO: 14674 - DNA, 80 bp, synthetic construct
  misc_feature 1..80: note = Synthetic: >AlphaCoV1-cand-27450-27529
  source 1..80: mol_type = other DNA
catggtggtctttcaaccctgaaactaatgcaattctttgtgttaatgcattgggtagaagctatgtgcttcctcttgat

SEQ ID NO: 14675 - DNA, 80 bp, synthetic construct
  misc_feature 1..80: note = Synthetic: >AlphaSp-cand-25450-25529
  source 1..80: mol_type = other DNA
aatcagacatccaactcttgagaactgtggagttgttagatggtaattacctctacattttctccagttgtcaagttgtt

SEQ ID NO: 14676 - DNA, 80 bp, synthetic construct
  misc_feature 1..80: note = Synthetic: >AlphaSp-cand-25530-25609
  source 1..80: mol_type = other DNA
ggtgttactaattcagcttttgaagagattcaactagacgaatatgctacaattagtgaatgataatggtatagttgtaa

SEQ ID NO: 14677 - DNA, 80 bp, synthetic construct
  misc_feature 1..80: note = Synthetic: >AlphaSp-cand-25610-25689
  source 1..80: mol_type = other DNA
atgcgattctctggctttttgtactctttttcgtgctaattattagcattactttcgtccaacttataaacctttgtttt

SEQ ID NO: 14678 - DNA, 80 bp, synthetic construct
  misc_feature 1..80: note = Synthetic: >AlphaSp-cand-25690-25769
  source 1..80: mol_type = other DNA
acttgccaccggttgtgtaataacgttgtttataaacctgttgggaaagtgtacggagtatacaagtcttatatgcgaat

SEQ ID NO: 14679 - DNA, 80 bp, synthetic construct
  misc_feature 1..80: note = Synthetic: >AlphaSp-cand-25770-25849
  source 1..80: mol_type = other DNA
tcaacccttgccatctgacattattcaagtataaacgaaaatgtcttctagtaatcaatctgttcctgttgaggaggtga

SEQ ID NO: 14680 - DNA, 80 bp, synthetic construct
  misc_feature 1..80: note = Synthetic: >AlphaSp-cand-25930-26009
  source 1..80: mol_type = other DNA
aaatattccagggttctctatggccttaagatggtcattctttggcttctttggccacttgtgctggcactgtccatttt

SEQ ID NO: 14681 - DNA, 80 bp, synthetic construct
  misc_feature 1..80: note = Synthetic: >AlphaSp-cand-26170-26249
  source 1..80: mol_type = other DNA
attctgtctgtctctgtgctgggtcggcatgtctgcctaccaatacttggtgcacccacgggcgtaacgctcacactgct

SEQ ID NO: 14682 - DNA, 80 bp, synthetic construct
  misc_feature 1..80: note = Synthetic: >AlphaSp-cand-26250-26329
  source 1..80: mol_type = other DNA
taatggcacattgcttgtagaaggctatcaggttgctactggcgtacaggtaaataatttacctagctacgttacagtcg

SEQ ID NO: 14683 - DNA, 80 bp, synthetic construct
  misc_feature 1..80: note = Synthetic: >AlphaSp-cand-26330-26409
  source 1..80: mol_type = other DNA
ccaaagcctcaacaacaatagtctaccagcgtgtgggacgttccatgaatgcaaattcaagtactggctgggctttcttc

SEQ ID NO: 14684 - DNA, 80 bp, synthetic construct
  misc_feature 1..80: note = Synthetic: >AlphaSp-cand-26410-26489
  source 1..80: mol_type = other DNA
gtgaagtccaagcatggcgactactatgctgctgcgaatccaacggaggttgtaacagatagtgagaaaattctacattt

SEQ ID NO: 14685 - DNA, 80 bp, synthetic construct
  misc_feature 1..80: note = Synthetic: >AlphaSp-cand-26490-26569
  source 1..80: mol_type = other DNA
agtctaaacagaaacttatggcttctgtaaaattccaacctcgtggtcgttccaagggacgtgttcctctgtctcttttt

SEQ ID NO: 14686 - DNA, 80 bp, synthetic construct
  misc_feature 1..80: note = Synthetic: >AlphaSp-cand-26570-26649
  source 1..80: mol_type = other DNA
gctccacttagggttactgatgaaaaaccactttacaaggtcctaccaaataatgccgtccctcagggagtgggaaataa

SEQ ID NO: 14687 - DNA, 80 bp, synthetic construct
  misc_feature 1..80: note = Synthetic: >AlphaSp-cand-26650-26729
  source 1..80: mol_type = other DNA
ggaccaacaaattggatactgggttgaacaacagcgctggcgaatgcgccgcggagaccgagttgacctgccatctaact

SEQ ID NO: 14688 - DNA, 80 bp, synthetic construct
  misc_feature 1..80: note = Synthetic: >Anlong-cand-21390-21469
  source 1..80: mol_type = other DNA
aggaaggtgttataacacttaaaactgtttctaacacatttaaattctcatgtagcaactcatctacatacactagacca

SEQ ID NO: 14689 - DNA, 80 bp, synthetic construct
  misc_feature 1..80: note = Synthetic: >Anlong-cand-21550-21629
  source 1..80: mol_type = other DNA
tgccactagttttgtgggtatgctaccacctatagtcagagagtttgtcatcacccgccttggtgatgtttatctaaatg

SEQ ID NO: 14690 - DNA, 80 bp, synthetic construct
  misc_feature 1..80: note = Synthetic: >Anlong-cand-21630-21709
  source 1..80: mol_type = other DNA
gctacaggattttctcagttggtgaagttgttagtgtaaattttaacattagttccacagaccatcgtgatttttggaca

SEQ ID NO: 14691 - DNA, 80 bp, synthetic construct
  misc_feature 1..80: note = Synthetic: >Anlong-cand-21710-21789
  source 1..80: mol_type = other DNA
gtggcatttgttaaaaatgctgaggtcatgcttgacattgaggatacatatataaaacagcttctctactgtaacaaccc

SEQ ID NO: 14692 - DNA, 80 bp, synthetic construct
  misc_feature 1..80: note = Synthetic: >Anlong-cand-21790-21869
  source 1..80: mol_type = other DNA
tgttaatgttgttaagtgtcagcagttgaagtttgtgcttgaagatggcttttactcttatgcacctccgtcagaagaaa

SEQ ID NO: 14693 - DNA, 80 bp, synthetic construct
  misc_feature 1..80: note = Synthetic: >Anlong-cand-21870-21949
  source 1..80: mol_type = other DNA
gtttgccacgtactattgtgcgattgccccgttttatgacacataattttattaatattagtgttgttgtgtcattttat

SEQ ID NO: 14694 - DNA, 80 bp, synthetic construct
  misc_feature 1..80: note = Synthetic: >Anlong-cand-21950-22029
  source 1..80: mol_type = other DNA
tttgatgatggtaaacacgacacacctgtgggtagtgacttttatgagtgtgcaacatgtgctcccaagtattacaaaat

SEQ ID NO: 14695 - DNA, 80 bp, synthetic construct
  misc_feature 1..80: note = Synthetic: >Anlong-cand-22030-22109
  source 1..80: mol_type = other DNA
tgcctttgcagactactgattggactgcagttcacggtgacagctcaaatgttacaagcgtttgtgttaacactgcaagt

SEQ ID NO: 14696 - DNA, 80 bp, synthetic construct
  misc_feature 1..80: note = Synthetic: >Anlong-cand-22110-22189
  source 1..80: mol_type = other DNA
ttcactaccaggttttttactaattatttaggtaccactgatggtgttcatataggaatagagactggaacttgcccatt

SEQ ID NO: 14697 - DNA, 80 bp, synthetic construct
  misc_feature 1..80: note = Synthetic: >Anlong-cand-22190-22269
  source 1..80: mol_type = other DNA
cagctttgacacgctcaataattatctgacatttggttcactatgtttttcaacagtaccaaatggtggctgtactatga

SEQ ID NO: 14698 - DNA, 80 bp, synthetic construct
  misc_feature 1..80: note = Synthetic: >Anlong-cand-22270-22349
  source 1..80: mol_type = other DNA
atatagttacacaaggaccttatggtcagccacacacatttgctgttttgtatgtgtcatacactgatggcgacaacatc

SEQ ID NO: 14699 - DNA, 80 bp, synthetic construct
  misc_feature 1..80: note = Synthetic: >Anlong-cand-22350-22429
  source 1..80: mol_type = other DNA
ataggtgtaccaccttctaacataccaccatatggtgtttcagacatgagtcaagtctattttgacacatgtactacgta

SEQ ID NO: 14700 - DNA, 80 bp, synthetic construct
  misc_feature 1..80: note = Synthetic: >Anlong-cand-22430-22509
  source 1..80: mol_type = other DNA
cactatttatggtatgactggtaggggtattataacacgtagtaacaacacctttattactggtctatattacacatcaa

SEQ ID NO: 14701 - DNA, 80 bp, synthetic construct
  misc_feature 1..80: note = Synthetic: >Anlong-cand-22510-22589
  source 1..80: mol_type = other DNA
atgcaggcaatttgttggcttacaaaaattctaccactggtattgtttataatgtttacccatgtcaactttctggacaa

SEQ ID NO: 14702 - DNA, 80 bp, synthetic construct
  misc_feature 1..80: note = Synthetic: >Anlong-cand-22590-22669
  source 1..80: mol_type = other DNA
gttgctgttattagtgacaacattgttggtatggcttcatccacacccaatgtgtcactagattttaatgttacagtcgt

SEQ ID NO: 14703 - DNA, 80 bp, synthetic construct
  misc_feature 1..80: note = Synthetic: >AvianCoV-cand-27870-27949
  source 1..80: mol_type = other DNA
tgtctatcgccagggaaatgtctaatctgtctacttagtagcctggaaacgaacggtagacccttagattttaatttagt

SEQ ID NO: 14704 - DNA, 80 bp, synthetic construct
  misc_feature 1..80: note = Synthetic: >AvianCoV-cand-27950-28029
  source 1..80: mol_type = other DNA
ttaatttttagtttagtttaagttagtttagagtaggtataaagatgccagtgccggggccacgcggagtacgatcgagg

SEQ ID NO: 14705 - DNA, 80 bp, synthetic construct
  misc_feature 1..80: note = Synthetic: >AvianCoV-cand-28030-28109
  source 1..80: mol_type = other DNA
gtacagcactaggacgcccactaggggaagagctaaattttagtttaagttaagtttaattggctaagtatagttaaaat

SEQ ID NO: 14706 - DNA, 80 bp, synthetic construct
  misc_feature 1..80: note = Synthetic: >Beluga-cand-30-109
  source 1..80: mol_type = other DNA
attcattcgtttacccttgtggcaaacaacccaaattaaacaaaacggacttgggtgtgtttcctgaccgcacgcgagtg

SEQ ID NO: 14707 - DNA, 80 bp, synthetic construct
  misc_feature 1..80: note = Synthetic: >Beluga-cand-110-189
  source 1..80: mol_type = other DNA
gggggtggcagctgagaggcacttcggtgtcggcttctgggccacctcttgtgggtgtgtggggacctgtcagagttcag

SEQ ID NO: 14708 - DNA, 80 bp, synthetic construct
  misc_feature 1..80: note = Synthetic: >Beluga-cand-190-269
  source 1..80: mol_type = other DNA
gcgacccctctcccaccgccattcggtgtgacagccttgggccttctacctggacactgtttgggtggggacgaccgtaa

SEQ ID NO: 14709 - DNA, 80 bp, synthetic construct
  misc_feature 1..80: note = Synthetic: >Beluga-cand-270-349
  source 1..80: mol_type = other DNA
gtcttcggacgaaaaggatccccaaaatatacccttacattccttgtacccccaaggtctggcgtcagccaacacacaga

SEQ ID NO: 14710 - DNA, 80 bp, synthetic construct
  misc_feature 1..80: note = Synthetic: >Beluga-cand-350-429
  source 1..80: mol_type = other DNA
ttgtattgtgtattgttagtggagtttgctagaggtagttgtcttctcaagtaacgtcgctttgcttcagtgacgaccga

SEQ ID NO: 14711 - DNA, 80 bp, synthetic construct
  misc_feature 1..80: note = Synthetic: >Beluga-cand-430-509
  source 1..80: mol_type = other DNA
gtggtgtcccggaaaatatctatcgctcggtttgagggatagtgattctaggatttgcttggagaagcacctatacttat

SEQ ID NO: 14712 - DNA, 80 bp, synthetic construct
  misc_feature 1..80: note = Synthetic: >Beluga-cand-510-589
  source 1..80: mol_type = other DNA
tgagcaaacatgtctaagtaccaaaagtcagtagtttctactagaaatgcaaaggtggaggtggtttacaccagaccagg

SEQ ID NO: 14713 - DNA, 80 bp, synthetic construct
  misc_feature 1..80: note = Synthetic: >Beluga-cand-590-669
  source 1..80: mol_type = other DNA
cttgccgttcctggattacctgcgcatcatgtatggaccaactaagaagttggatcagataaaggacacctccattggag

SEQ ID NO: 14714 - DNA, 80 bp, synthetic construct
  misc_feature 1..80: note = Synthetic: >Beluga-cand-670-749
  source 1..80: mol_type = other DNA
aagttcattgtggggataaggtccttaaatttatcaacaaccccgtagtgggtattgtttgtaatgaaggtgatgtaccc

SEQ ID NO: 14715 - DNA, 80 bp, synthetic construct
  misc_feature 1..80: note = Synthetic: >Beluga-cand-750-829
  source 1..80: mol_type = other DNA
tttccagaacttgaagaaaagtatggagggaatgagcttactaagctctatcagcaccttgctgctactcagtctatttg

SEQ ID NO: 14716 - DNA, 80 bp, synthetic construct
  misc_feature 1..80: note = Synthetic: >Beluga-cand-830-909
  source 1..80: mol_type = other DNA
gagcaaaagctctgccgatttggtggcaaaggctgagtctgtggcgcatgttgaaggaattgatagattggttgggtgtt

SEQ ID NO: 14717 - DNA, 80 bp, synthetic construct
  misc_feature 1..80: note = Synthetic: >Beluga-cand-910-989
  source 1..80: mol_type = other DNA
acaaccttcgtatcaatatgtgtgcgactcttgcagtgcttaagaacttcctttggaagattgaaggtcttgttaagaat

SEQ ID NO: 14718 - DNA, 80 bp, synthetic construct
  misc_feature 1..80: note = Synthetic: >Beluga-cand-990-1069
  source 1..80: mol_type = other DNA
gtagctgagggctatattgaacctatgcaggataagtttaatactttgcttggtgattacctggtaagtgttaaaattac

SEQ ID NO: 14719 - DNA, 80 bp, synthetic construct
  misc_feature 1..80: note = Synthetic: >BtCoV_008_16-cand-15780-15859
  source 1..80: mol_type = other DNA
tcaatttttacatgctatcatattaccaagaacaccaagttccaaattggtgagttcacctttgagaagttggaatatga

SEQ ID NO: 14720 - DNA, 80 bp, synthetic construct
  misc_feature 1..80: note = Synthetic: >BtCoV_008_16-cand-15860-15939
  source 1..80: mol_type = other DNA
taatgatgcagttagttataagtctactgctactacaaagctcttgccaggtatgatttttgtgcttacttcgcacaatg

SEQ ID NO: 14721 - DNA, 80 bp, synthetic construct
  misc_feature 1..80: note = Synthetic: >BtCoV_008_16-cand-15940-16019
  source 1..80: mol_type = other DNA
ttcaaccacttagagcacctacgcttgttaaccaggaacggtactctagcatttataagcttcacccagctcttaatata

SEQ ID NO: 14722 - DNA, 80 bp, synthetic construct
  misc_feature 1..80: note = Synthetic: >BtCoV_008_16-cand-16020-16099
  source 1..80: mol_type = other DNA
catgagtcctatgcaaaccttgtgccatactatcaattggtaggtaaacagaagattactactatccagggacctcccgg

SEQ ID NO: 14723 - DNA, 80 bp, synthetic construct
  misc_feature 1..80: note = Synthetic: >BtCoV_008_16-cand-16100-16179
  source 1..80: mol_type = other DNA
tagtggtaagtcccactgtgttattggcctgggtttgtacttccccgctgctcgcattgtttttacagcctgctcacatg

SEQ ID NO: 14724 - DNA, 80 bp, synthetic construct
  misc_feature 1..80: note = Synthetic: >BtCoV_008_16-cand-16180-16259
  source 1..80: mol_type = other DNA
cagctgttgattctttatgcgttaaggctgccactgcttatagtgctgacaagtgctctagaataataccacaacgtgct

SEQ ID NO: 14725 - DNA, 80 bp, synthetic construct
  misc_feature 1..80: note = Synthetic: >BtCoV_008_16-cand-16260-16339
  source 1..80: mol_type = other DNA
agagttgaatgttatgatggtttcaagtcaaataatactagtgctcaatacctcttctccactgttaatgcattgcctga

SEQ ID NO: 14726 - DNA, 80 bp, synthetic construct
  misc_feature 1..80: note = Synthetic: >BtCoV_008_16-cand-16340-16419
  source 1..80: mol_type = other DNA
ggttaattgcgatatatgtgttgtagatgaggtttccatgtgcactaattatgatttgtccgttatcaatcaaagagtca

SEQ ID NO: 14727 - DNA, 80 bp, synthetic construct
  misc_feature 1..80: note = Synthetic: >BtCoV_008_16-cand-16420-16499
  source 1..80: mol_type = other DNA
gctttaggcacattgtctatgttggcgacccacaacagttgcctgcacctcgtgttatgatcactagaggtgttcttgaa

SEQ ID NO: 14728 - DNA, 80 bp, synthetic construct
  misc_feature 1..80: note = Synthetic: >BtCoV_008_16-cand-16500-16579
  source 1..80: mol_type = other DNA
cctaaggactataatgtcattacccagcgtatgtgtgctatcaaaccagatgtatttttgcataagtgttacaggtgtcc

SEQ ID NO: 14729 - DNA, 80 bp, synthetic construct
  misc_feature 1..80: note = Synthetic: >BtCoV_008_16-cand-16580-16659
  source 1..80: mol_type = other DNA
tgccgaaattgtgcgtacagtttcagaaatggtctatgaaaaccagtttatacctgtgcaccctgatagcaaacaatgtt

SEQ ID NO: 14730 - DNA, 80 bp, synthetic construct
  misc_feature 1..80: note = Synthetic: >BtCoV_008_16-cand-16660-16739
  source 1..80: mol_type = other DNA
ttaaaattctttgtaagggtagtgttcaagttgataatggttccagcataaataggcgccaacttgatgtcgttagaatg

SEQ ID NO: 14731 - DNA, 80 bp, synthetic construct
  misc_feature 1..80: note = Synthetic: >BtCoV_008_16-cand-16740-16819
  source 1..80: mol_type = other DNA
tttttggccaaaaatcctgcgtggtctaaagccgtttttatttcaccatataatagtcaaaattatgttgctagtcgtgt

SEQ ID NO: 14732 - DNA, 80 bp, synthetic construct
  misc_feature 1..80: note = Synthetic: >BtCoV_008_16-cand-16820-16899
  source 1..80: mol_type = other DNA
gttggggcttcagattcaaactgttgactcatctcagggtagtgagtatgactatgtcatctacacacaaacctctgaca

SEQ ID NO: 14733 - DNA, 80 bp, synthetic construct
  misc_feature 1..80: note = Synthetic: >BtCoV_008_16-cand-16900-16979
  source 1..80: mol_type = other DNA
cggctcatgctagcaatgtaaatcgttttaatgttgctataacacgtgctaagaagggaattctttgtgttatgtgcgac

SEQ ID NO: 14734 - DNA, 80 bp, synthetic construct
  misc_feature 1..80: note = Synthetic: >BtCoV_008_16-cand-16980-17059
  source 1..80: mol_type = other DNA
aaagaactatttgacttgcttaagttttacgaacttaagttgtctgatttacaggcaggtgaaggttgtgggctgtttaa

SEQ ID NO: 14735 - DNA, 80 bp, synthetic construct
  misc_feature 1..80: note = Synthetic: >BtCoV_008_16-cand-18340-18419
  source 1..80: mol_type = other DNA
cattcttcttttatgacgattcagagtgtgataagtcacatgattctattaactatgtaccgctgcgtgcctcaaattgc

SEQ ID NO: 14736 - DNA, 80 bp, synthetic construct
  misc_feature 1..80: note = Synthetic: >BtCoV_008_16-cand-18420-18499
  source 1..80: mol_type = other DNA
ataaccaagtgcaacgttggtggcgccgtttgtagtaaacattgtgcactttaccacaattatgtcaatgcatataacac

SEQ ID NO: 14737 - DNA, 80 bp, synthetic construct
  misc_feature 1..80: note = Synthetic: >BtCoV_008_16-cand-18500-18579
  source 1..80: mol_type = other DNA
gtttacttcagctggttttacaatctgggtacccacgacttttgacatttataatttgtggcagacctttgttgtaccca

SEQ ID NO: 14738 - DNA, 80 bp, synthetic construct
  misc_feature 1..80: note = Synthetic: >BtCoV_008_16-cand-18580-18659
  source 1..80: mol_type = other DNA
atttacagggtttggaaaatatagcttttaatgtagttaagaaaggttcttttgtaggggccgaaggtgaacttcccgtg

SEQ ID NO: 14739 - DNA, 80 bp, synthetic construct
  misc_feature 1..80: note = Synthetic: >BtCoV_008_16-cand-18660-18739
  source 1..80: mol_type = other DNA
gccattgtaaacgatagagtcatggtacgtgatggtgccactgacaatctagtttacactaataaaacctctttgcctac

SEQ ID NO: 14740 - DNA, 80 bp, synthetic construct
  misc_feature 1..80: note = Synthetic: >BtCoV_008_16-cand-18740-18819
  source 1..80: mol_type = other DNA
caatgtggcctttgaactctatgcaaagaggaaaattggtctcacaccaccactcaccttgcttaaaaacttaggtgtct

SEQ ID NO: 14741 - DNA, 80 bp, synthetic construct
  misc_feature 1..80: note = Synthetic: >BtCoV_008_16-cand-18820-18899
  source 1..80: mol_type = other DNA
tgtgcacatacaagtgtgtgttgtgggactatgaagcagaacgacctcttactacgtttactaagtctgtgtgtaagtac

SEQ ID NO: 14742 - DNA, 80 bp, synthetic construct
  misc_feature 1..80: note = Synthetic: >BtCoV_008_16-cand-18900-18979
  source 1..80: mol_type = other DNA
actgattttgaaggtgatgtctgtacattgtttgataacagtgttgcaggagcatttgagcggtttacgatggctaagaa

SEQ ID NO: 14743 - DNA, 80 bp, synthetic construct
  misc_feature 1..80: note = Synthetic: >BtCoV_008_16-cand-18980-19059
  source 1..80: mol_type = other DNA
tggtgttcttatttcgttgaccgctgttaaaaagctcacagccattaaaattagttatggttatcttaatggtgtgccag

SEQ ID NO: 14744 - DNA, 80 bp, synthetic construct
  misc_feature 1..80: note = Synthetic: >BtCoV_008_16-cand-19060-19139
  source 1..80: mol_type = other DNA
tttccacacatgaagataaaccttttacatggtatatttacacacgtaagaatggtgcttttgacgattaccctgatggt

SEQ ID NO: 14745 - DNA, 80 bp, synthetic construct
  misc_feature 1..80: note = Synthetic: >BtCoV_008_16-cand-19140-19219
  source 1..80: mol_type = other DNA
tatttcacacaaggccgtactgctagtgattttaagcctcgtagtacaatggaagaagatttccttggtatggatacttc

SEQ ID NO: 14746 - DNA, 80 bp, synthetic construct
  misc_feature 1..80: note = Synthetic: >BtCoV_008_16-cand-19220-19299
  source 1..80: mol_type = other DNA
tctatttattgcgaaatatggcttagaggactacggttttgagcatgtggtttatggtgatgtgtcaaaatccacacttg

SEQ ID NO: 14747 - DNA, 80 bp, synthetic construct
  misc_feature 1..80: note = Synthetic: >BtCoV_008_16-cand-19300-19379
  source 1..80: mol_type = other DNA
gtggcttgcatcttcttatatcacagattcgcttggccaatataggtattcttaaggtggaagacttttattctagctca

SEQ ID NO: 14748 - DNA, 80 bp, synthetic construct
  misc_feature 1..80: note = Synthetic: >BtCoV_008_16-cand-19380-19459
  source 1..80: mol_type = other DNA
gatagcactttgaagtcttgcactgttacctatgctgataatcctagtagtaagatggtttgtacttatgttgaccttct

SEQ ID NO: 14749 - DNA, 80 bp, synthetic construct
  misc_feature 1..80: note = Synthetic: >BtCoV_008_16-cand-19460-19539
  source 1..80: mol_type = other DNA
tttagatgactttgtctccattttgaagtcattggatcttagtgttgtttctaaggttcatgaagtcatcgttgattgta

SEQ ID NO: 14750 - DNA, 80 bp, synthetic construct
  misc_feature 1..80: note = Synthetic: >BtCoV_008_16-cand-19540-19619
  source 1..80: mol_type = other DNA
aggtgtggcgttggatgctttggtgtaaggataataaagtccaaactttctatccacagctccagtctgctgagtggaag

SEQ ID NO: 14751 - DNA, 80 bp, synthetic construct
  misc_feature 1..80: note = Synthetic: >Delta-cand-25710-25789
  source 1..80: mol_type = other DNA
gggttcatccgcagaagagtggcaaattattgttttcattgcgatcatatgggcgcttggcgtcatcctccaaggaggct

SEQ ID NO: 14752 - DNA, 80 bp, synthetic construct
  misc_feature 1..80: note = Synthetic: >Delta-cand-25790-25869
  source 1..80: mol_type = other DNA
atgccacgcgtaatcgtgtgatctatgttattaaacttattctgctttggctgctccaacccttcaccctagtggtgacc

SEQ ID NO: 14753 - DNA, 80 bp, synthetic construct
  misc_feature 1..80: note = Synthetic: >Delta-cand-25870-25949
  source 1..80: mol_type = other DNA
atttggaccgcagtgtattttgctatgcctgccacttatttgaagttaactggtgagtctactgattatattaaccagac

SEQ ID NO: 14754 - DNA, 80 bp, synthetic construct
  misc_feature 1..80: note = Synthetic: >Delta-cand-25950-26029
  source 1..80: mol_type = other DNA
taacgcacattatcaaaggaatgacagatcatctaagctttactctcgtaaaggtctcgataattctgaaaaggacgcag

SEQ ID NO: 14755 - DNA, 80 bp, synthetic construct
  misc_feature 1..80: note = Synthetic: >Delta-cand-26030-26109
  source 1..80: mol_type = other DNA
ttttcattgtgtccataatttttgccgtactgaccttcatatcctgggccaagtactggtatgactcaattcgtttatta

SEQ ID NO: 14756 - DNA, 80 bp, synthetic construct
  misc_feature 1..80: note = Synthetic: >Delta-cand-26110-26189
  source 1..80: mol_type = other DNA
atgaaaaccagatctgcatgggcactctcacctgagagtagactccttgcagggattatggatccaatgggtacatggag

SEQ ID NO: 14757 - DNA, 80 bp, synthetic construct
  misc_feature 1..80: note = Synthetic: >Delta-cand-26190-26269
  source 1..80: mol_type = other DNA
gtgcattcccatcgaccacatggctccaattctcacaccagtcgttaagcatggcaagctcaagctacatgggcaagagc

SEQ ID NO: 14758 - DNA, 80 bp, synthetic construct
  misc_feature 1..80: note = Synthetic: >Delta-cand-26520-26599
  source 1..80: mol_type = other DNA
agattgtgcaataagcggcacatcagaagagaggatgttcctgagcttattgaccctctcgttaaaactcgctgttttgc

SEQ ID NO: 14759 - DNA, 80 bp, synthetic construct
  misc_feature 1..80: note = Synthetic: >Delta-cand-26760-26839
  source 1..80: mol_type = other DNA
tttgaaaccaatcaaacaacaatagcacctgcaggtgcgcggcaacgctaagcgctattgtagcccctagtcacccatac

SEQ ID NO: 14760 - DNA, 80 bp, synthetic construct
  misc_feature 1..80: note = Synthetic: >Delta-cand-26840-26919
  source 1..80: mol_type = other DNA
ctgtctaattagccctaaagagggcgagagaataaagggtaggagtgctagacatagattattgtttgcacatataaaca

SEQ ID NO: 14761 - DNA, 80 bp, synthetic construct
  misc_feature 1..80: note = Synthetic: >Delta-cand-26920-26999
  source 1..80: mol_type = other DNA
gaagtatgcatagtaaaaccacaaacagagattaaagttttgacaccaaaatcttatatcatggctgcaccagtagtccc

SEQ ID NO: 14762 - DNA, 80 bp, synthetic construct
  misc_feature 1..80: note = Synthetic: >HKU1-cand-16060-16139
  source 1..80: mol_type = other DNA
taagggttatatagctaatataagtgtttttcaacaagttttgtactatcagaataatgtttttatgtctgaatctaaat

SEQ ID NO: 14763 - DNA, 80 bp, synthetic construct
  misc_feature 1..80: note = Synthetic: >HKU1-cand-16140-16219
  source 1..80: mol_type = other DNA
gttgggttgaaaatgatattactaatggtcctcatgaattttgttcccaacatactatgttggttaagatagatggtgat

SEQ ID NO: 14764 - DNA, 80 bp, synthetic construct
  misc_feature 1..80: note = Synthetic: >HKU1-cand-16230-16309
  source 1..80: mol_type = other DNA
taccatatccagatccttctagaattctaggagctggttgttttgttgatgatttattgaagactgacagtgttcttttg

SEQ ID NO: 14765 - DNA, 80 bp, synthetic construct
  misc_feature 1..80: note = Synthetic: >HKU1-cand-16310-16389
  source 1..80: mol_type = other DNA
atagagcgctttgtaagtctagctatagatgcttaccctttagtatatcatgaaaatgaagaataccaaaaagtctttcg

SEQ ID NO: 14766 - DNA, 80 bp, synthetic construct
  misc_feature 1..80: note = Synthetic: >HKU1-cand-16390-16469
  source 1..80: mol_type = other DNA
tgtatatttagaatatataaaaaaactgtataatgatcttggtactcagatcttagatagttatagtgttattttaagta

SEQ ID NO: 14767 - DNA, 80 bp, synthetic construct
  misc_feature 1..80: note = Synthetic: >HKU1-cand-16470-16549
  source 1..80: mol_type = other DNA
cttgtgatggtttaaagtttactgaagaatcattttacaagaatatgtatttaaaaagtgccgtgatgcagagtgtaggt

SEQ ID NO: 14768 - DNA, 80 bp, synthetic construct
  misc_feature 1..80: note = Synthetic: >HKU1-cand-16550-16629
  source 1..80: mol_type = other DNA
gcatgtgttgtttgttcatcacaaacttctttgcgttgtggcagttgtatacgtaagcctttgttatgttgtaaatgttg

SEQ ID NO: 14769 - DNA, 80 bp, synthetic construct
  misc_feature 1..80: note = Synthetic: >HKU1-cand-16630-16709
  source 1..80: mol_type = other DNA
ttatgaccatgttatggcaactaatcataaatatgttttgagtgtctcaccttacgtttgtaatgcacctaactgtgatg

SEQ ID NO: 14770 - DNA, 80 bp, synthetic construct
  misc_feature 1..80: note = Synthetic: >HKU1-cand-16710-16789
  source 1..80: mol_type = other DNA
tgagtgatgtcaccaaattatatttgggtggtatgtcttactattgtgaaaaccataaaccccattattcatttaagtta

SEQ ID NO: 14771 - DNA, 80 bp, synthetic construct
  misc_feature 1..80: note = Synthetic: >HKU1-cand-16790-16869
  source 1..80: mol_type = other DNA
gttatgaatggtatggtctttggtttgtataaacaatcttgtacgggttcaccttatatagatgattttaataagatagc

SEQ ID NO: 14772 - DNA, 80 bp, synthetic construct
  misc_feature 1..80: note = Synthetic: >HKU1-cand-16870-16949
  source 1..80: mol_type = other DNA
tagttgtaaatggacagaagttgatgattatgttctggcaaatgagtgtattgaacgtttaaagttatttgctgcagaaa

SEQ ID NO: 14773 - DNA, 80 bp, synthetic construct
  misc_feature 1..80: note = Synthetic: >HKU1-cand-16950-17029
  source 1..80: mol_type = other DNA
ctcaaaaggcaactgaagaggcttttaaacaaagctatgcttctgctaccattcaagagattgttagtgatagagaagtt

SEQ ID NO: 14774 - DNA, 80 bp, synthetic construct
  misc_feature 1..80: note = Synthetic: >HKU1-cand-17030-17109
  source 1..80: mol_type = other DNA
attttgtgttgggagacaggtaaagttaaaccaccacttaataaaaattatgttttcacaggctaccattttactagtac

SEQ ID NO: 14775 - DNA, 80 bp, synthetic construct
  misc_feature 1..80: note = Synthetic: >HKU1-cand-17110-17189
  source 1..80: mol_type = other DNA
tggtaagacagttttaggtgagtatgtttttgataaaagtgaattaactaacggtgtgtattaccgcgctacaactactt

SEQ ID NO: 14776 - DNA, 80 bp, synthetic construct
  misc_feature 1..80: note = Synthetic: >HKU1-cand-17190-17269
  source 1..80: mol_type = other DNA
ataaactttctataggtgatgtttttgttttaacatcacattctgtagctagtttaagtgcacctacacttgtcccacaa

SEQ ID NO: 14777 - DNA, 80 bp, synthetic construct
  misc_feature 1..80: note = Synthetic: >HKU1-cand-17270-17349
  source 1..80: mol_type = other DNA
gagaactatgctagtataagattttctagtgtttatagtgttccattggtgtttcaaaataatgttgctaattatcagca

SEQ ID NO: 14778 - DNA, 80 bp, synthetic construct
  misc_feature 1..80: note = Synthetic: >HKU1-cand-18630-18709
  source 1..80: mol_type = other DNA
atgctactcgcgaaaacattggaacaaactttccactgcaaataggtttttcaactggtgtggattttgtagttgaagct

SEQ ID NO: 14779 - DNA, 80 bp, synthetic construct
  misc_feature 1..80: note = Synthetic: >HKU1-cand-18710-18789
  source 1..80: mol_type = other DNA
actggcttatttgctgagagagattgttatacttttaaaaaaactgtagctaaagctcctcctggtgaaaaatttaaaca

SEQ ID NO: 14780 - DNA, 80 bp, synthetic construct
  misc_feature 1..80: note = Synthetic: >HKU1-cand-18790-18869
  source 1..80: mol_type = other DNA
tttaataccccttatgtcaaaaggtcaaaagtgggatattgttagaattagaattgttcaaatgttatctgattatcttt

SEQ ID NO: 14781 - DNA, 80 bp, synthetic construct
  misc_feature 1..80: note = Synthetic: >HKU1-cand-18870-18949
  source 1..80: mol_type = other DNA
tagacctttctgatagtgtagtatttattacttggtctgccagttttgaacttacttgtttaaggtattttgctaaatta

SEQ ID NO: 14782 - DNA, 80 bp, synthetic construct
  misc_feature 1..80: note = Synthetic: >HKU1-cand-18950-19029
  source 1..80: mol_type = other DNA
ggcagagagcttaattgtaatgtgtgttctaatcgtgctacatgctacaattctagaactggttattatggttgttggcg

SEQ ID NO: 14783 - DNA, 80 bp, synthetic construct
  misc_feature 1..80: note = Synthetic: >HKU1-cand-19030-19109
  source 1..80: mol_type = other DNA
ccatagttatacttgtgattatgtgtataatccacttattgtagatatacaacagtggggttatacaggttctttaacta

SEQ ID NO: 14784 - DNA, 80 bp, synthetic construct
  misc_feature 1..80: note = Synthetic: >HKU1-cand-19110-19189
  source 1..80: mol_type = other DNA
gtaatcacgatataatttgtaatgtacataaaggtgcacatgttgcgtcagctgatgcaattatgactcgttgtttagca

SEQ ID NO: 14785 - DNA, 80 bp, synthetic construct
  misc_feature 1..80: note = Synthetic: >HKU1-cand-19190-19269
  source 1..80: mol_type = other DNA
atctatgattgtttttgtaaatctgttaattggaatttagagtatccaataatttctaatgaggtcagtataaatacatc

SEQ ID NO: 14786 - DNA, 80 bp, synthetic construct
  misc_feature 1..80: note = Synthetic: >HKU1-cand-19270-19349
  source 1..80: mol_type = other DNA
ttgtaggttattgcagcgtgtcatgcttaaagctgccatgctatgtaatagatacaacttatgttatgacataggcaatc

SEQ ID NO: 14787 - DNA, 80 bp, synthetic construct
  misc_feature 1..80: note = Synthetic: >HKU1-cand-19350-19429
  source 1..80: mol_type = other DNA
ctaaaggtttagcttgtgtcaaagattatgaatttaaattttatgatgcttttcctgtagccaagtctgttaaacagtta

SEQ ID NO: 14788 - DNA, 80 bp, synthetic construct
  misc_feature 1..80: note = Synthetic: >HKU1-cand-19430-19509
  source 1..80: mol_type = other DNA
ttttatgtctatgatgtgcataaagataattttaaagatggtttatgtatgttttggaattgtaatgttgataaatatcc

SEQ ID NO: 14789 - DNA, 80 bp, synthetic construct
  misc_feature 1..80: note = Synthetic: >HKU1-cand-19510-19589
  source 1..80: mol_type = other DNA
atctaattcaattgtttgtagatttgacactcgagttttaaataaattaaaccttcctggatgtaatggtggtagtttgt

SEQ ID NO: 14790 - DNA, 80 bp, synthetic construct
  misc_feature 1..80: note = Synthetic: >HKU1-cand-19590-19669
  source 1..80: mol_type = other DNA
atgttaataaacatgcattccatactaatccttttactagaactgtttttgaaaatcttaagcctatgccttttttctat

SEQ ID NO: 14791 - DNA, 80 bp, synthetic construct
  misc_feature 1..80: note = Synthetic: >HKU1-cand-19670-19749
  source 1..80: mol_type = other DNA
tattcagatacgccttgtgtgtacgtagatggtttagaatctaaacaagttgattacgttcctttaagaagcgccacttg

SEQ ID NO: 14792 - DNA, 80 bp, synthetic construct
  misc_feature 1..80: note = Synthetic: >HKU1-cand-19750-19829
  source 1..80: mol_type = other DNA
tatcacacggtgtaatctaggtggagctgtttgttcaaagcatgctgaagaatattgtaactaccttgagtcttataata

SEQ ID NO: 14793 - DNA, 80 bp, synthetic construct
  misc_feature 1..80: note = Synthetic: >HKU1-cand-19830-19909
  source 1..80: mol_type = other DNA
tagttactacagcaggctttactttttgggtttataagaattttgatttttataatttatggaacacttttactacgtta

SEQ ID NO: 14794 - DNA, 80 bp, synthetic construct
  misc_feature 1..80: note = Synthetic: >HKU15-cand-9040-9119
  source 1..80: mol_type = other DNA
atgctactcgctgccatgcatgttttccctgtacacttgtacccaatagtactgccatgcttcactgtcgtggcattcct

SEQ ID NO: 14795 - DNA, 80 bp, synthetic construct
  misc_feature 1..80: note = Synthetic: >HKU15-cand-9190-9269
  source 1..80: mol_type = other DNA
gttgtaaatgctaacactttttggataccgaacacatttctgcgcacctgctacgaaactatattcggttccccaattgc

SEQ ID NO: 14796 - DNA, 80 bp, synthetic construct
  misc_feature 1..80: note = Synthetic: >HKU15-cand-9270-9349
  source 1..80: mol_type = other DNA
tcagcgactgtatggttacactgttgctctttatatgctgatctatgctggacttgcaatcaactatacgttgaaaacac

SEQ ID NO: 14797 - DNA, 80 bp, synthetic construct
  misc_feature 1..80: note = Synthetic: >HKU15-cand-9350-9429
  source 1..80: mol_type = other DNA
tccggtatagagcaacttcattcttatctttttgcatgcagtggtttcaatatggttatgttgcacacattgcgtacaaa

SEQ ID NO: 14798 - DNA, 80 bp, synthetic construct
  misc_feature 1..80: note = Synthetic: >HKU15-cand-9430-9509
  source 1..80: mol_type = other DNA
ctgcttaataaaccctggacagaatcactactcttcacagccttcacaatgctaaccagtcatcctttgttggctgctct

SEQ ID NO: 14799 - DNA, 80 bp, synthetic construct
  misc_feature 1..80: note = Synthetic: >HKU15-cand-9510-9589
  source 1..80: mol_type = other DNA
tagctggtggctagctggtcgcgtaactctgcccattatcatgcctgacttagctattcgtgttttggcgtataacgtca

SEQ ID NO: 14800 - DNA, 80 bp, synthetic construct
  misc_feature 1..80: note = Synthetic: >HKU15-cand-9590-9669
  source 1..80: mol_type = other DNA
ttggctatgtcatatgtgttcgatttggccttatgtggcttgcaaatcggttcacaactgtacctatgggcacataccag

SEQ ID NO: 14801 - DNA, 80 bp, synthetic construct
  misc_feature 1..80: note = Synthetic: >HKU15-cand-9670-9749
  source 1..80: mol_type = other DNA
tatatggtgtctgtagagcaacttaagtacatgatggcagttaagatgtccccaccgcgtaatgcgtttgaggtgcttat

SEQ ID NO: 14802 - DNA, 80 bp, synthetic construct
  misc_feature 1..80: note = Synthetic: >HKU15-cand-9750-9829
  source 1..80: mol_type = other DNA
agccaacattagacttcttggtttgggtggaaaccgtaacattgctgtttctactgtccaaaacaaaattcttgatgcaa

SEQ ID NO: 14803 - DNA, 80 bp, synthetic construct
  misc_feature 1..80: note = Synthetic: >HKU15-cand-9830-9909
  source 1..80: mol_type = other DNA
aagctactgctgttgttgttgctaaccttcttgaaaaggctggcgtcacaaacaagcacgctatttgcaaaaagattgtg

SEQ ID NO: 14804 - DNA, 80 bp, synthetic construct
  misc_feature 1..80: note = Synthetic: >HKU15-cand-9910-9989
  source 1..80: mol_type = other DNA
aaactccacaatgatacccttaaagccaccacttatgaggaggttgaggtagcacttgtgaaacttctttctcacataat

SEQ ID NO: 14805 - DNA, 80 bp, synthetic construct
  misc_feature 1..80: note = Synthetic: >HKU15-cand-9990-10069
  source 1..80: mol_type = other DNA
tgagttcttgccaactgatcaggtagatgcttatctagctgatgcggccaatgctcaacatgttaatacctattttgaca

SEQ ID NO: 14806 - DNA, 80 bp, synthetic construct
  misc_feature 1..80: note = Synthetic: >HKU15-cand-24450-24529
  source 1..80: mol_type = other DNA
cgtggaagtggcccaagatctcaatctgttaactccagaggcacaggcaatcagcccaggaaacgcgaccaatctgcacc

SEQ ID NO: 14807 - DNA, 80 bp, synthetic construct
  misc_feature 1..80: note = Synthetic: >HKU15-cand-24530-24609
  source 1..80: mol_type = other DNA
agctgcggtacgtcgtaagacccagcatcaagctcccaagcggactttacccaagggtaaaaccatttctcaggtatttg

SEQ ID NO: 14808 - DNA, 80 bp, synthetic construct
  misc_feature 1..80: note = Synthetic: >HKU15-cand-24610-24689
  source 1..80: mol_type = other DNA
gcaaccggtctcgtactggtgccaatgtcggctctgcagacactgagaagacgggtatggctgatcctcgcatcatggct

SEQ ID NO: 14809 - DNA, 80 bp, synthetic construct
  misc_feature 1..80: note = Synthetic: >HKU15-cand-24690-24769
  source 1..80: mol_type = other DNA
ctagccagacatgtgcctggtgttcaggaaatgcttttcgctggccaccttgagagcaactttcaggcgggggcaattac

SEQ ID NO: 14810 - DNA, 80 bp, synthetic construct
  misc_feature 1..80: note = Synthetic: >HKU15-cand-24770-24849
  source 1..80: mol_type = other DNA
ccttaccttctcctactcaatcacagtcaaggagggttctcctgactatgagagacttaaggatgcgctcaatacggtcg

SEQ ID NO: 14811 - DNA, 80 bp, synthetic construct
  misc_feature 1..80: note = Synthetic: >HKU15-cand-24850-24929
  source 1..80: mol_type = other DNA
ttaaccagacctatgagccacccaccaaaccaactaaggacaagaagcctgacaaacaagaccagtctgctaaacccaaa

SEQ ID NO: 14812 - DNA, 80 bp, synthetic construct
  misc_feature 1..80: note = Synthetic: >HKU15-cand-24930-25009
  source 1..80: mol_type = other DNA
cagcagaagaaacctaaaaaggtaactctgccagcagacaaacaggattgggagtgggatgatgcttttgagataaagca

SEQ ID NO: 14813 - DNA, 80 bp, synthetic construct
  misc_feature 1..80: note = Synthetic: >HKU15-cand-25010-25089
  source 1..80: mol_type = other DNA
ggaatcagcagcgtagacatcaatctatgtctgttaaacccacccaactccactcaaatatctctttggttccagagagt

SEQ ID NO: 14814 - DNA, 80 bp, synthetic construct
  misc_feature 1..80: note = Synthetic: >HKU15-cand-25250-25329
  source 1..80: mol_type = other DNA
aatctcaacttttgttgagccacaattttaatcctaattggagaaggccaaaggactgtactacttttgtaggtgtagca

SEQ ID NO: 14815 - DNA, 80 bp, synthetic construct
  misc_feature 1..80: note = Synthetic: >HKU2-cand-0-79
  source 1..80: mol_type = other DNA
ggggacttaaagatataatctatctgccgatagagtctttatctttttagactttccagtctactcttctcaactaaacg

SEQ ID NO: 14816 - DNA, 80 bp, synthetic construct
  misc_feature 1..80: note = Synthetic: >HKU2-cand-80-159
  source 1..80: mol_type = other DNA
aaatttacgtctttttgtgtatgctacgcatgcacaattagatgtgtatttgagatttcgttccaggttgccagccttgt

SEQ ID NO: 14817 - DNA, 80 bp, synthetic construct
  misc_feature 1..80: note = Synthetic: >HKU2-cand-160-239
  source 1..80: mol_type = other DNA
gtaacaagtgtcgtgcttctaggggttgcacttgacgtgttccgtcacgtacttgtgtccttagttgccccacgctgttc

SEQ ID NO: 14818 - DNA, 80 bp, synthetic construct
  misc_feature 1..80: note = Synthetic: >HKU2-cand-240-319
  source 1..80: mol_type = other DNA
cgtcagtgtggtgtgtgaatatagtgttccgtcactattgaaaccgataactgtgcacaatggctatcaaccaattgaca

SEQ ID NO: 14819 - DNA, 80 bp, synthetic construct
  misc_feature 1..80: note = Synthetic: >HKU4-cand-1250-1329
  source 1..80: mol_type = other DNA
acatttaccactctgcttatgttgattgtaatgcatgtggtaggggtacgtggtgtactgggaatgctatacagggcttt

SEQ ID NO: 14820 - DNA, 80 bp, synthetic construct
  misc_feature 1..80: note = Synthetic: >HKU4-cand-1730-1809
  source 1..80: mol_type = other DNA
cagaggttgttttagcaatactgtctggtacgacatctacttttgaagagttgcgtgacttgtgtcataatgcgagttat

SEQ ID NO: 14821 - DNA, 80 bp, synthetic construct
  misc_feature 1..80: note = Synthetic: >HKU4-cand-1890-1969
  source 1..80: mol_type = other DNA
tgcaaatggtgtttgcaatgctactattaatgctccttttatcgccttcactggtcttggtgagtcatttaaaaaagttt

SEQ ID NO: 14822 - DNA, 80 bp, synthetic construct
  misc_feature 1..80: note = Synthetic: >HKU4-cand-16110-16189
  source 1..80: mol_type = other DNA
gacggtactgtcatgatggagcggtatgtgtcattggctatagatgcgtatcctctaacaaagcatgatgatactgaata

SEQ ID NO: 14823 - DNA, 80 bp, synthetic construct
  misc_feature 1..80: note = Synthetic: >HKU4-cand-16190-16269
  source 1..80: mol_type = other DNA
ccaaaatgtattctgggtctatttacagtatattgaaaagctttataaggacctaactggacacatgcttgacagttatt

SEQ ID NO: 14824 - DNA, 80 bp, synthetic construct
  misc_feature 1..80: note = Synthetic: >HKU4-cand-16270-16349
  source 1..80: mol_type = other DNA
ctgttatgttatgtggtgatgattcagccaaattttgggaagaggggttctatagagatctctatagttcgcctaccaca

SEQ ID NO: 14825 - DNA, 80 bp, synthetic construct
  misc_feature 1..80: note = Synthetic: >HKU4-cand-16350-16429
  source 1..80: mol_type = other DNA
ttacaggctgtaggttcttgtgttgtgtgtcactcacaaacatctttgaggtgtggtacatgtatacgaagacctttctt

SEQ ID NO: 14826 - DNA, 80 bp, synthetic construct
  misc_feature 1..80: note = Synthetic: >HKU4-cand-16430-16509
  source 1..80: mol_type = other DNA
atgttgcaagtgttgttatgatcatgtaattgcaacacctcataaaatggttctgtcagtttcaccttatgtctgtaatg

SEQ ID NO: 14827 - DNA, 80 bp, synthetic construct
  misc_feature 1..80: note = Synthetic: >HKU4-cand-16510-16589
  source 1..80: mol_type = other DNA
cacctggttgtgatgtttcagatgttactaaattatatctgggaggtatgagttattattgtaatgaccatcgcccagta

SEQ ID NO: 14828 - DNA, 80 bp, synthetic construct
  misc_feature 1..80: note = Synthetic: >HKU4-cand-16590-16669
  source 1..80: mol_type = other DNA
tgtagttttcctctttgtgccaatggcttagtctttggtttatataaaaatatgtgcaccggtagttcgtctattatgga

SEQ ID NO: 14829 - DNA, 80 bp, synthetic construct
  misc_feature 1..80: note = Synthetic: >HKU4-cand-16670-16749
  source 1..80: mol_type = other DNA
atttaatagacttgctacttgtgattggagtgatagcggtgactacactcttgctaatacaactacagaacctcttaaat

SEQ ID NO: 14830 - DNA, 80 bp, synthetic construct
  misc_feature 1..80: note = Synthetic: >HKU4-cand-16750-16829
  source 1..80: mol_type = other DNA
tatttgcggctgagacacttagagctacagaagaagcttctaaacagtcgtatgctatagccactatcaaagaaatagtc

SEQ ID NO: 14831 - DNA, 80 bp, synthetic construct
  misc_feature 1..80: note = Synthetic: >HKU4-cand-16830-16909
  source 1..80: mol_type = other DNA
ggtgaacgtgaattaatacttgtgtgggaggttggtaaatccaaaccaccactcaaccgtaattatgtttttactggtta

SEQ ID NO: 14832 - DNA, 80 bp, synthetic construct
  misc_feature 1..80: note = Synthetic: >HKU4-cand-16910-16989
  source 1..80: mol_type = other DNA
tcatttaaccaagaatagtaaagtacagctcggtgagtatgtcttcgagcgtatagattatagtgatgctgtctcttata

SEQ ID NO: 14833 - DNA, 80 bp, synthetic construct
  misc_feature 1..80: note = Synthetic: >HKU4-cand-16990-17069
  source 1..80: mol_type = other DNA
aatctagtactacgtataagctagcagtaggagacatctttgtgcttacctctcattcagtggcgacattgtcagcgcca

SEQ ID NO: 14834 - DNA, 80 bp, synthetic construct
  misc_feature 1..80: note = Synthetic: >HKU4-cand-17070-17149
  source 1..80: mol_type = other DNA
acaatagtgaatcaagagaggtatttaaaaataactggtatatatccaactattactgtgcctgaggagtttgcaaatca

SEQ ID NO: 14835 - DNA, 80 bp, synthetic construct
  misc_feature 1..80: note = Synthetic: >HKU4-cand-17150-17229
  source 1..80: mol_type = other DNA
tgtagtgaactttcaaaaagcaggctttagtaagtatgttaccgtgcaaggtcctcctggtacaggtaagagtcattttg

SEQ ID NO: 14836 - DNA, 80 bp, synthetic construct
  misc_feature 1..80: note = Synthetic: >HKU4-cand-17230-17309
  source 1..80: mol_type = other DNA
ctatagggttggcaatatactaccctacagcacgcattgtttatacagcatgctcacatgcggcagttgatgcattgtgt

SEQ ID NO: 14837 - DNA, 80 bp, synthetic construct
  misc_feature 1..80: note = Synthetic: >HKU4-cand-17310-17389
  source 1..80: mol_type = other DNA
gagaaggcttttaagtatttgaacattgctaaatgttctcgtattattcctgctaaagcgcgtgtagagtgttatgacag

SEQ ID NO: 14838 - DNA, 80 bp, synthetic construct
  misc_feature 1..80: note = Synthetic: >Lucheng19-cand-80-159
  source 1..80: mol_type = other DNA
aagaatgttaaaagaaatacgaagcacttaaagaatacaatctatcaaacatagatacaacactaacccccctcttgact

SEQ ID NO: 14839 - DNA, 80 bp, synthetic construct
  misc_feature 1..80: note = Synthetic: >Lucheng19-cand-160-239
  source 1..80: mol_type = other DNA
tcggtcaactcaactcaactaaacgaaatcccccttacatggttccgacccgtgtaagggtgtgcatttcgtgcagccgc

SEQ ID NO: 14840 - DNA, 80 bp, synthetic construct
  misc_feature 1..80: note = Synthetic: >Lucheng19-cand-240-319
  source 1..80: mol_type = other DNA
tgcccctactacgtgtaaccgcaaagacatttccaggttcgcacgtcttggaggaaacggtgtgtacgtttctagtgttt

SEQ ID NO: 14841 - DNA, 80 bp, synthetic construct
  misc_feature 1..80: note = Synthetic: >Lucheng19-cand-320-399
  source 1..80: mol_type = other DNA
acgctcgtatcggttccggcccgataggtattgcactaaaagtcctgtgggtggttccgaccctccccttgtgtgacacg

SEQ ID NO: 14842 - DNA, 80 bp, synthetic construct
  misc_feature 1..80: note = Synthetic: >Lucheng19-cand-400-479
  source 1..80: mol_type = other DNA
cctattccgaccagtgaggtcaccacacacgtccttaagacatggccaaccaatatgtactgcgtatagcagactgcaca

SEQ ID NO: 14843 - DNA, 80 bp, synthetic construct
  misc_feature 1..80: note = Synthetic: >Lucheng19-cand-480-559
  source 1..80: mol_type = other DNA
aacattcactacaaccgcttgtggtccccgccacacgcagtaacggattacggagcagcagcggcttgtggattcaccaa

SEQ ID NO: 14844 - DNA, 80 bp, synthetic construct
  misc_feature 1..80: note = Synthetic: >Lucheng19-cand-560-639
  source 1..80: mol_type = other DNA
ctgtaggtttgtagcttttggacttgagcacctgctttacgggtatgatgatgaacattgggttttgatcctttccggta

SEQ ID NO: 14845 - DNA, 80 bp, synthetic construct
  misc_feature 1..80: note = Synthetic: >Lucheng19-cand-640-719
  source 1..80: mol_type = other DNA
atcaggtcctcaatgtagaactaggacagttcaaggagcgaccagataacattcgtggttatctcgtcatctccaactgt

SEQ ID NO: 14846 - DNA, 80 bp, synthetic construct
  misc_feature 1..80: note = Synthetic: >Lucheng19-cand-720-799
  source 1..80: mol_type = other DNA
acctattatgaagaaaccttcgacctctttcttggcagaagtcgcggcaccatagcgcctaatccaatttatgtggatca

SEQ ID NO: 14847 - DNA, 80 bp, synthetic construct
  misc_feature 1..80: note = Synthetic: >Lucheng19-cand-800-879
  source 1..80: mol_type = other DNA
gtacctatgtggcccagatggaacacctgtcaagaaagatctcgagtttaagaattactttacgaatgagggggacacct

SEQ ID NO: 14848 - DNA, 80 bp, synthetic construct
  misc_feature 1..80: note = Synthetic: >Lucheng19-cand-880-959
  source 1..80: mol_type = other DNA
atgtggaacccggcaaaacatacaaacgcgtgtggaatgtcgagcgcaagcacgatgatctaaccctcaatggaatacta

SEQ ID NO: 14849 - DNA, 80 bp, synthetic construct
  misc_feature 1..80: note = Synthetic: >Lucheng19-cand-960-1039
  source 1..80: mol_type = other DNA
agcattaagtacctcagtgacaaacctcacaaacttcgtgacggtgccattcaagaagtcgctgacgcagtgagcgaact

SEQ ID NO: 14850 - DNA, 80 bp, synthetic construct
  misc_feature 1..80: note = Synthetic: >Lucheng19-cand-1040-1119
  source 1..80: mol_type = other DNA
taatgatacaaaacaaatggttcgcttcattcatgcctttgtctcctgcccctgtggcaagagcgcattcaccgttggta

SEQ ID NO: 14851 - DNA, 80 bp, synthetic construct
  misc_feature 1..80: note = Synthetic: >Lucheng19-cand-1120-1199
  source 1..80: mol_type = other DNA
ggtggaagggttttgccacagtctgctgtggtaaaaccgtgaagaccccaatgtgcgtaaaattctccggcaaagcagga

SEQ ID NO: 14852 - DNA, 80 bp, synthetic construct
  misc_feature 1..80: note = Synthetic: >Lucheng19-cand-1200-1279
  source 1..80: mol_type = other DNA
tccatcttcgctttgccacttggctcacgcggctttagcactaacggaaaacgtagctatgcaggcgctgaatttcaata

SEQ ID NO: 14853 - DNA, 80 bp, synthetic construct
  misc_feature 1..80: note = Synthetic: >Lucheng19-cand-3840-3919
  source 1..80: mol_type = other DNA
gctcgcagactacgacacaaataatgttaatactcatgtcgcaaaaaaccaaaataagtttccaacaacgcccatagacg

SEQ ID NO: 14854 - DNA, 80 bp, synthetic construct
  misc_feature 1..80: note = Synthetic: >Lucheng19-cand-3920-3999
  source 1..80: mol_type = other DNA
agaggggtggttataaacacctacaactccgtgacaataattgctgggcaaatgcagtctttgtgggactgcaactctgc

SEQ ID NO: 14855 - DNA, 80 bp, synthetic construct
  misc_feature 1..80: note = Synthetic: >Lucheng19-cand-4000-4079
  source 1..80: mol_type = other DNA
aactactacaagaaggataacatggactggcaatgtgcacttagcggcgccaattcaagcttcctagagaagctatataa

SEQ ID NO: 14856 - DNA, 80 bp, synthetic construct
  misc_feature 1..80: note = Synthetic: >Lucheng19-cand-4080-4159
  source 1..80: mol_type = other DNA
cgccaataaaacattttatgggtcaacagcagatgcagcacaggctctggagagcatgctagatggtgacacctgcatga

SEQ ID NO: 14857 - DNA, 80 bp, synthetic construct
  misc_feature 1..80: note = Synthetic: >Lucheng19-cand-4160-4239
  source 1..80: mol_type = other DNA
ctgtcaaactgcaacgctcctgcgtctgcggtgacaagactgttaaactcaagaccagtgtgctcaaattcagacctatc

SEQ ID NO: 14858 - DNA, 80 bp, synthetic construct
  misc_feature 1..80: note = Synthetic: >Lucheng19-cand-4240-4319
  source 1..80: mol_type = other DNA
aatggcttctttgactacggtgagtgcaaagtctgtgaaacaaaaattaaggcactcatactacatatagagggcaaagg

SEQ ID NO: 14859 - DNA, 80 bp, synthetic construct
  misc_feature 1..80: note = Synthetic: >Lucheng19-cand-4320-4399
  source 1..80: mol_type = other DNA
cttcttttgctacacagccactaaggatagcaagatactatttccagggtgcgtcggtgaaattgtctacacgggtcccg

SEQ ID NO: 14860 - DNA, 80 bp, synthetic construct
  misc_feature 1..80: note = Synthetic: >Lucheng19-cand-4400-4479
  source 1..80: mol_type = other DNA
ataagggtggccactactatataaagtatgatggtggataccatgacggtaccggtactaagcattctgctaaagcccgc

SEQ ID NO: 14861 - DNA, 80 bp, synthetic construct
  misc_feature 1..80: note = Synthetic: >Lucheng19-cand-4480-4559
  source 1..80: mol_type = other DNA
agccaagtagctgtctacaatgttgatggcttaccaaaacctattttggtaagacaaggtattagattctacaaagcaga

SEQ ID NO: 14862 - DNA, 80 bp, synthetic construct
  misc_feature 1..80: note = Synthetic: >Lucheng19-cand-4560-4639
  source 1..80: mol_type = other DNA
tttcacagacatgcttaaatttaagccaccttgtgttgtcaatgcagcaaattccaacctagcacacgggggtggtattg

SEQ ID NO: 14863 - DNA, 80 bp, synthetic construct
  misc_feature 1..80: note = Synthetic: >Lucheng19-cand-4640-4719
  source 1..80: mol_type = other DNA
ccagagccataaaccaagccactaacggtgagctgcagaagctgtcaaatcgctgtaaaaacaaacctaaggtaggttcc

SEQ ID NO: 14864 - DNA, 80 bp, synthetic construct
  misc_feature 1..80: note = Synthetic: >Lucheng19-cand-4720-4799
  source 1..80: mol_type = other DNA
tgcaaagctataaagtgtaaaaactttgaagtgcttaatgcagttggaccacaagagactgataataatgtagatggtct

SEQ ID NO: 14865 - DNA, 80 bp, synthetic construct
  misc_feature 1..80: note = Synthetic: >Lucheng19-cand-4800-4879
  source 1..80: mol_type = other DNA
gctccgcaaggcatacgacgcagttaaaaaacacagtcatgggctaacaataacaccactacttagtgttggtatattta

SEQ ID NO: 14866 - DNA, 80 bp, synthetic construct
  misc_feature 1..80: note = Synthetic: >Lucheng19-cand-4880-4959
  source 1..80: mol_type = other DNA
aagtcccaattgaaaaatcattagcgaagtttcttaatacatttgatggttttaccaacttctattgttatgtctacaca

SEQ ID NO: 14867 - DNA, 80 bp, synthetic construct
  misc_feature 1..80: note = Synthetic: >Lucheng19-cand-4960-5039
  source 1..80: mol_type = other DNA
gaggctgaagctacagcactccagcagtattttgacaacctcaatagtttgacttttgaggccgctacatcctcaggtga

SEQ ID NO: 14868 - DNA, 80 bp, synthetic construct
  misc_feature 1..80: note = Synthetic: >Lucheng19-cand-5040-5119
  source 1..80: mol_type = other DNA
tgttgaaccgaccaaaaccactgaggaagtcactgttacatttggtaccactgacacctcaagtattgaggaagttcttg

SEQ ID NO: 14869 - DNA, 80 bp, synthetic construct
  misc_feature 1..80: note = Synthetic: >Lucheng19-cand-10240-10319
  source 1..80: mol_type = other DNA
agtaaggtaaagaacgtcttcgaaggatttactttattcttcttcttcgtcgcgctattctggactcaatttctcatgta

SEQ ID NO: 14870 - DNA, 80 bp, synthetic construct
  misc_feature 1..80: note = Synthetic: >Lucheng19-cand-10320-10399
  source 1..80: mol_type = other DNA
cacatctatttcaattctgcaatgggaagtcatcatagcagttctggcagccttaacgtgtgcttctgctatgaccatag

SEQ ID NO: 14871 - DNA, 80 bp, synthetic construct
  misc_feature 1..80: note = Synthetic: >Lucheng19-cand-10400-10479
  source 1..80: mol_type = other DNA
tgtttattaaacacaagatggtttttctttatggctatgtgattccagcgacattggttattgtgttcagcaatttcctg

SEQ ID NO: 14872 - DNA, 80 bp, synthetic construct
  misc_feature 1..80: note = Synthetic: >Lucheng19-cand-10480-10559
  source 1..80: mol_type = other DNA
tgggattatgtggtttctgccataataacggagcatgctgcatttatggctgcatattttgcatttgatgtgcaaagtgt

SEQ ID NO: 14873 - DNA, 80 bp, synthetic construct
  misc_feature 1..80: note = Synthetic: >Lucheng19-cand-10560-10639
  source 1..80: mol_type = other DNA
ttttaatatgtttatgctgagttttgtcctaatattgcacctcgcacgcttttattgcagcggtggtgcgcttatgacat

SEQ ID NO: 14874 - DNA, 80 bp, synthetic construct
  misc_feature 1..80: note = Synthetic: >Lucheng19-cand-10640-10719
  source 1..80: mol_type = other DNA
gcttattttcatgtgcctacaccgttggactgtttatgtattttgtaaagatcgacgttcttagtgcattcttcatgttt

SEQ ID NO: 14875 - DNA, 80 bp, synthetic construct
  misc_feature 1..80: note = Synthetic: >Lucheng19-cand-10720-10799
  source 1..80: mol_type = other DNA
attagtggaatacaatgcagctgggccattacctggtccagctacaaaatagcaacatatgcgatgagttatgtctcacc

SEQ ID NO: 14876 - DNA, 80 bp, synthetic construct
  misc_feature 1..80: note = Synthetic: >Lucheng19-cand-10800-10879
  source 1..80: mol_type = other DNA
ctattatattgaagtttttggctatactaagatcctgatggtcatgtacctaggcatgggttatttgttctgtgcatatt

SEQ ID NO: 14877 - DNA, 80 bp, synthetic construct
  misc_feature 1..80: note = Synthetic: >Lucheng19-cand-10880-10959
  source 1..80: mol_type = other DNA
atggtattttatactgggttaataggtttacaatgaacaacttctcaatgtgtctaggatattacgactattgtgtgtca

SEQ ID NO: 14878 - DNA, 80 bp, synthetic construct
  misc_feature 1..80: note = Synthetic: >Lucheng19-cand-10960-11039
  source 1..80: mol_type = other DNA
caggctgagttcaaatacatggttgctaacaatcttaaatgtcccacaaaccccatggaagctctatatctaaatatcaa

SEQ ID NO: 14879 - DNA, 80 bp, synthetic construct
  misc_feature 1..80: note = Synthetic: >Lucheng19-cand-11040-11119
  source 1..80: mol_type = other DNA
acttatgggtgttggcggacctaaaaagattaaactatccacaatacagtcaaaactcacagatctgaaatgcacaaatg

SEQ ID NO: 14880 - DNA, 80 bp, synthetic construct
  misc_feature 1..80: note = Synthetic: >Lucheng19-cand-11120-11199
  source 1..80: mol_type = other DNA
ttgttctgctaagttgtctgtcaagtatgaatgttgctgttaattctaaagagtggagctactgtgtacaactacacaat

SEQ ID NO: 14881 - DNA, 80 bp, synthetic construct
  misc_feature 1..80: note = Synthetic: >Lucheng19-cand-11200-11279
  source 1..80: mol_type = other DNA
gatataaatctctgtgatgatcctgaaaaggccacagagaaattgctggcactatgctcattcttcctctcaaaacaaca

SEQ ID NO: 14882 - DNA, 80 bp, synthetic construct
  misc_feature 1..80: note = Synthetic: >Lucheng19-cand-11280-11359
  source 1..80: mol_type = other DNA
aaatttcaatcttgatgcattgatagattcctatttcgataataaagctatactacatagcgtagcatccacatttgcat

SEQ ID NO: 14883 - DNA, 80 bp, synthetic construct
  misc_feature 1..80: note = Synthetic: >Lucheng19-cand-11440-11519
  source 1..80: mol_type = other DNA
gtaagacaactacttaaggccatgaatattgcaaagagtgaatttgatctggaattatcagttcagcgtaaattgaatag

SEQ ID NO: 14884 - DNA, 80 bp, synthetic construct
  misc_feature 1..80: note = Synthetic: >PEDV-cand-13790-13869
  source 1..80: mol_type = other DNA
taaccagactgttaaacctggccatttcaataaggagttttatgacttcttacttgagcaaggtttcttttctgagggct

SEQ ID NO: 14885 - DNA, 80 bp, synthetic construct
  misc_feature 1..80: note = Synthetic: >PEDV-cand-13870-13949
  source 1..80: mol_type = other DNA
ctgagcttactttaaagcacttcttctttgcacagaagggtgatgcagctgttaaggattttgactactataggtataat

SEQ ID NO: 14886 - DNA, 80 bp, synthetic construct
  misc_feature 1..80: note = Synthetic: >PEDV-cand-13950-14029
  source 1..80: mol_type = other DNA
agacctactgttctggacatttgccaagctcgcgtcgtgtatcaaatagtgcaacgctattttgatatttacgaaggtgg

SEQ ID NO: 14887 - DNA, 80 bp, synthetic construct
  misc_feature 1..80: note = Synthetic: >PEDV-cand-14030-14109
  source 1..80: mol_type = other DNA
ttgtatcactgctaaagaggtggttgttacaaaccttaacaagagcgcaggttatcctttgaacaagtttggtaaagctg

SEQ ID NO: 14888 - DNA, 80 bp, synthetic construct
  misc_feature 1..80: note = Synthetic: >PEDV-cand-14110-14189
  source 1..80: mol_type = other DNA
gtctttactatgagtctttatcctatgaggaacaggatgaactttatgcttatactaagcgtaacatcctgcccactatg

SEQ ID NO: 14889 - DNA, 80 bp, synthetic construct
  misc_feature 1..80: note = Synthetic: >PEDV-cand-14190-14269
  source 1..80: mol_type = other DNA
acacagctcaaccttaaatatgctataagtggcaaagaacgtgcacgcacagtgggtggtgtttcgcttttgtcaaccat

SEQ ID NO: 14890 - DNA, 80 bp, synthetic construct
  misc_feature 1..80: note = Synthetic: >PEDV-cand-14270-14349
  source 1..80: mol_type = other DNA
gactactcggcagtatcatcagaaacaccttaagtccatagttaatactaggggcgcttcggttgttattggtactacta

SEQ ID NO: 14891 - DNA, 80 bp, synthetic construct
  misc_feature 1..80: note = Synthetic: >PEDV-cand-14350-14429
  source 1..80: mol_type = other DNA
agttttatggtggttgggacaatatgcttaagaaccttattgatggtgttgaaaatccgtgtcttatgggttgggactac

SEQ ID NO: 14892 - DNA, 80 bp, synthetic construct
  misc_feature 1..80: note = Synthetic: >PEDV-cand-14430-14509
  source 1..80: mol_type = other DNA
ccaaagtgcgacagagcactgcccaatatgatacgtatgatttcagccatgattttaggctctaagcacaccacatgctg

SEQ ID NO: 14893 - DNA, 80 bp, synthetic construct
  misc_feature 1..80: note = Synthetic: >PEDV-cand-14510-14589
  source 1..80: mol_type = other DNA
cagttccactgaccgctttttcaggttgtgcaatgaattggctcaagtccttactgaggttgtttattctaatggaggtt

SEQ ID NO: 14894 - DNA, 80 bp, synthetic construct
  misc_feature 1..80: note = Synthetic: >PEDV-cand-14590-14669
  source 1..80: mol_type = other DNA
tttatttgaagccaggtggtactacctctggtgatgcaaccaccgcatatgcaaactcagttttcaatatcttccaagca

SEQ ID NO: 14895 - DNA, 80 bp, synthetic construct
  misc_feature 1..80: note = Synthetic: >PEDV-cand-14670-14749
  source 1..80: mol_type = other DNA
gtaagtgccaatgttaacaaacttcttagtgttgacagcaatgtctgtcataatttagaagttaagcaattgcagcgtaa

SEQ ID NO: 14896 - DNA, 80 bp, synthetic construct
  misc_feature 1..80: note = Synthetic: >PEDV-cand-14750-14829
  source 1..80: mol_type = other DNA
gctttatgagtgctgttatagatcaactaccgtcgatgaccagttcgtcgttgagtattatggttacttgcgtaaacatt

SEQ ID NO: 14897 - DNA, 80 bp, synthetic construct
  misc_feature 1..80: note = Synthetic: >PEDV-cand-14830-14909
  source 1..80: mol_type = other DNA
tttcaatgatgattctttctgatgatggcgttgtttgttataacaatgactatgcatcacttggttatgtcgctgatctt

SEQ ID NO: 14898 - DNA, 80 bp, synthetic construct
  misc_feature 1..80: note = Synthetic: >PEDV-cand-14910-14989
  source 1..80: mol_type = other DNA
aacgcattcaaggctgttttgtattaccagaacaatgtcttcatgagcgcctctaaatgttggatcgagcctgacattaa

SEQ ID NO: 14899 - DNA, 80 bp, synthetic construct
  misc_feature 1..80: note = Synthetic: >PEDV-cand-14990-15069
  source 1..80: mol_type = other DNA
taaaggtcctcatgaattttgctcgcagcatactatgcagattgtcgataaagatggtacttattaccttccttaccctg

SEQ ID NO: 14900 - DNA, 80 bp, synthetic construct
  misc_feature 1..80: note = Synthetic: >PEDV-cand-17620-17699
  source 1..80: mol_type = other DNA
aacgcggccaaccatgggatgttgtccgcaaacgtatagtgcagatgtgtagtgactacctggccaacctatcagacata

SEQ ID NO: 14901 - DNA, 80 bp, synthetic construct
  misc_feature 1..80: note = Synthetic: >PEDV-cand-17700-17779
  source 1..80: mol_type = other DNA
ctaatttttgtgttgtgggctggtggtttggagttgacaactatgcgttattttgtcaagattggaccaagtaagagttg

SEQ ID NO: 14902 - DNA, 80 bp, synthetic construct
  misc_feature 1..80: note = Synthetic: >PEDV-cand-17780-17859
  source 1..80: mol_type = other DNA
tgattgtggtaaggttgctacttgttacaatagtgcgctgcatacgtactgttgtttcaaacatgcccttggttgtgatt

SEQ ID NO: 14903 - DNA, 80 bp, synthetic construct
  misc_feature 1..80: note = Synthetic: >PEDV-cand-17860-17939
  source 1..80: mol_type = other DNA
atctgtataacccatactgtattgatatacagcagtggggatacaagggatcacttagccttaaccaccatgagcattgt

SEQ ID NO: 14904 - DNA, 80 bp, synthetic construct
  misc_feature 1..80: note = Synthetic: >PEDV-cand-17940-18019
  source 1..80: mol_type = other DNA
aatgtacatagaaacgagcatgtggcttctggtgatgcccataatgactcgctgtctggccatacatgattgctttgtca

SEQ ID NO: 14905 - DNA, 80 bp, synthetic construct
  misc_feature 1..80: note = Synthetic: >PEDV-cand-18020-18099
  source 1..80: mol_type = other DNA
agaacgttgactggtccatcacatacccatttattggtaatgaggctgttattaataagagcggccgaattgtgcaatca

SEQ ID NO: 14906 - DNA, 80 bp, synthetic construct
  misc_feature 1..80: note = Synthetic: >PEDV-cand-18100-18179
  source 1..80: mol_type = other DNA
cacactatgcggtcagttcttaagttatacaatccgaaagccatatatgatattggcaatcctaagggcattagatgtgc

SEQ ID NO: 14907 - DNA, 80 bp, synthetic construct
  misc_feature 1..80: note = Synthetic: >PEDV-cand-18180-18259
  source 1..80: mol_type = other DNA
cgtaacggatgctaagtggttttgctttgacaagaatcctactaattctaatgtcaagacattggagtatgactatataa

SEQ ID NO: 14908 - DNA, 80 bp, synthetic construct
  misc_feature 1..80: note = Synthetic: >PEDV-cand-18260-18339
  source 1..80: mol_type = other DNA
cacatggccaatttgatgggttgtgcttgttttggaattgcaatgtagacatgtatccagaattttctgtggtctgtcgt

SEQ ID NO: 14909 - DNA, 80 bp, synthetic construct
  misc_feature 1..80: note = Synthetic: >PEDV-cand-18340-18419
  source 1..80: mol_type = other DNA
tttgatactcgctgtaggtcaccactcaacttggagggttgtaatggtggttcactgtatgttaataatcatgcattcca

SEQ ID NO: 14910 - DNA, 80 bp, synthetic construct
  misc_feature 1..80: note = Synthetic: >PEDV-cand-18420-18499
  source 1..80: mol_type = other DNA
tacaccggcttttgacaagcgtgcttttgctaagttgaagccaatgccatttttcttttatgatgatactgagtgtgaca

SEQ ID NO: 14911 - DNA, 80 bp, synthetic construct
  misc_feature 1..80: note = Synthetic: >PEDV-cand-18500-18579
  source 1..80: mol_type = other DNA
agttacaggactccataaactatgttcctcttagggctagtaactgcattactaaatgtaatgttggtggtgctgtctgt

SEQ ID NO: 14912 - DNA, 80 bp, synthetic construct
  misc_feature 1..80: note = Synthetic: >PEDV-cand-18580-18659
  source 1..80: mol_type = other DNA
agtaagcattgtgctatgtatcatagctatgttaatgcttacaacacttttacgtcggcgggctttactatttgggtgcc

SEQ ID NO: 14913 - DNA, 80 bp, synthetic construct
  misc_feature 1..80: note = Synthetic: >PEDV-cand-18660-18739
  source 1..80: mol_type = other DNA
tacttcgtttgacacctataatctgtggcagacatttagtaacaatttgcaaggtcttgagaacattgctttcaatgtcg

SEQ ID NO: 14914 - DNA, 80 bp, synthetic construct
  misc_feature 1..80: note = Synthetic: >PEDV-cand-18740-18819
  source 1..80: mol_type = other DNA
taaagaaaggatcttttgttggtgccgaaggtgaacttcctgtagctgtggttaatgacaaagtgctcgttagagatggt

SEQ ID NO: 14915 - DNA, 80 bp, synthetic construct
  misc_feature 1..80: note = Synthetic: >PEDV-cand-18820-18899
  source 1..80: mol_type = other DNA
actgttgatactcttgtttttacaaacaagacatcactacccactaacgtagcttttgagttgtatgccaagcgtaaggt

SEQ ID NO: 14916 - DNA, 80 bp, synthetic construct
  misc_feature 1..80: note = Synthetic: >Sparrow-cand-12910-12989
  source 1..80: mol_type = other DNA
aatctgcgggctacccatttaacaaactgggtaaagctcgtaactattacgacatgacatatgccgagcaaaaccaactg

SEQ ID NO: 14917 - DNA, 80 bp, synthetic construct
  misc_feature 1..80: note = Synthetic: >Sparrow-cand-12990-13069
  source 1..80: mol_type = other DNA
tttgagtatacaaaacgtaatgttttgcctacactcactcagatgaatcttaaatatgcaatttcagccaaagatcgtgc

SEQ ID NO: 14918 - DNA, 80 bp, synthetic construct
  misc_feature 1..80: note = Synthetic: >Sparrow-cand-13070-13149
  source 1..80: mol_type = other DNA
tcgtactgttgccggtgtgtctattattagcacaatgactaacagacagtaccatcagaagatgctgaaatctatctcac

SEQ ID NO: 14919 - DNA, 80 bp, synthetic construct
  misc_feature 1..80: note = Synthetic: >Sparrow-cand-13230-13309
  source 1..80: mol_type = other DNA
aatatcaataatcccattttagtgggttgggattaccccaagtgtgatcgttccatgccgaatatgttgcgcattgctgc

SEQ ID NO: 14920 - DNA, 80 bp, synthetic construct
  misc_feature 1..80: note = Synthetic: >Sparrow-cand-13390-13469
  source 1..80: mol_type = other DNA
tgctatcagaagtggtagtctctggcaacaatctctatgtaaaaccaggtggcacgagcagtggtgatgcaaccacagct

SEQ ID NO: 14921 - DNA, 80 bp, synthetic construct
  misc_feature 1..80: note = Synthetic: >Sparrow-cand-13470-13549
  source 1..80: mol_type = other DNA
tatgctaactcggtattcaacattttacaggttgtctctgctaatgtcgcaacctttttgtcaacttccactacgtcaca

SEQ ID NO: 14922 - DNA, 80 bp, synthetic construct
  misc_feature 1..80: note = Synthetic: >Sparrow-cand-13550-13629
  source 1..80: mol_type = other DNA
tatcaataaagaaattgcggatctgcaccgcagtctttatgaagatatttatcgtggtgattcaaatgatatcactgtca

SEQ ID NO: 14923 - DNA, 80 bp, synthetic construct
  misc_feature 1..80: note = Synthetic: >Sparrow-cand-13710-13789
  source 1..80: mol_type = other DNA
gacgttgctaagtctggagccgtagctgatcttgatggtttccgagacattttgttctaccaaaataatgtttatatggc

SEQ ID NO: 14924 - DNA, 80 bp, synthetic construct
  misc_feature 1..80: note = Synthetic: >Sparrow-cand-13870-13949
  source 1..80: mol_type = other DNA
atgatggcaaaccttactacctaccttacccagatgtatctcgcatcctgggtgcctgcatttttgtggatgacgttaac

SEQ ID NO: 14925 - DNA, 80 bp, synthetic construct
  misc_feature 1..80: note = Synthetic: >Sparrow-cand-13960-14039
  source 1..80: mol_type = other DNA
ctgtgcagaaccttgaacgttacatctcacttgcaattgacgcttacccgcttacaaaggttgaccctataaagggtaaa

SEQ ID NO: 14926 - DNA, 80 bp, synthetic construct
  misc_feature 1..80: note = Synthetic: >Sparrow-cand-14040-14119
  source 1..80: mol_type = other DNA
gtcttttatcttttacttgattatatacgtgttcttgctcaggagcttcaggatggtatccttgatgccttccagtcgct

SEQ ID NO: 14927 - DNA, 80 bp, synthetic construct
  misc_feature 1..80: note = Synthetic: >Sparrow-cand-19220-19299
  source 1..80: mol_type = other DNA
caacccggcgactgcctgtaagctaaaagcaacacccatcatctctgcacgggagttagagaagaagccaattcttcgct

SEQ ID NO: 14928 - DNA, 80 bp, synthetic construct
  misc_feature 1..80: note = Synthetic: >Sparrow-cand-19300-19379
  source 1..80: mol_type = other DNA
acctcgttgcttcaggacgccttcttgtaaggcctccagaatgcagagaattgtattaatactcctccttcttggcacca

SEQ ID NO: 14929 - DNA, 80 bp, synthetic construct
  misc_feature 1..80: note = Synthetic: >Sparrow-cand-19350-19429
  source 1..80: mol_type = other DNA
ttgtattaatactcctccttcttggcaccacccatgccaagttagctgatgatatactcgatgttcttacctttccaggg

SEQ ID NO: 14930 - DNA, 80 bp, synthetic construct
  misc_feature 1..80: note = Synthetic: >Sparrow-cand-19430-19509
  source 1..80: mol_type = other DNA
gcacatcgcttcttacataagtactccaaggatgctccacagcctagagagcgtgacaattgaacggtcaatgtaggaca

SEQ ID NO: 14931 - DNA, 80 bp, synthetic construct
  misc_feature 1..80: note = Synthetic: >Sparrow-cand-19510-19589
  source 1..80: mol_type = other DNA
aatgccaggatttcccaccagccacgttgaccttccctcagtgattttcaccacttactaactccacgctgcctattaat

SEQ ID NO: 14932 - DNA, 80 bp, synthetic construct
  misc_feature 1..80: note = Synthetic: >Sparrow-cand-19590-19669
  source 1..80: mol_type = other DNA
gggctaacaacgtcacaggagttaccaacctctgtatttatcttgttttgtaaatataaccaataatacactaaacatgc

SEQ ID NO: 14933 - DNA, 80 bp, synthetic construct
  misc_feature 1..80: note = Synthetic: >Sparrow-cand-19670-19749
  source 1..80: mol_type = other DNA
acttacaacctaatgaccacttccggcagacacttatggctgtattagagaccgtgtcaaaaacaagtcccatgatgcac

SEQ ID NO: 14934 - DNA, 80 bp, synthetic construct
  misc_feature 1..80: note = Synthetic: >Sparrow-cand-19750-19829
  source 1..80: mol_type = other DNA
ttagcctcatgctagaccttactgacaccactagtgcatatatcaaggtgtatgggcctgactataggacatcttttaca

SEQ ID NO: 14935 - DNA, 80 bp, synthetic construct
  misc_feature 1..80: note = Synthetic: >Sparrow-cand-19830-19909
  source 1..80: mol_type = other DNA
tgtgttggacttgaattagaaggaggtggtactgttaatattgcatgtactgaaaacttgaataaaacaactgcattaca

SEQ ID NO: 14936 - DNA, 80 bp, synthetic construct
  misc_feature 1..80: note = Synthetic: >Sparrow-cand-19910-19989
  source 1..80: mol_type = other DNA
aaattctacattgggcttattcagccaataagcagctctattgctttaccaatgatacatcacctagtcaaagctatatt

SEQ ID NO: 14937 - DNA, 80 bp, synthetic construct
  misc_feature 1..80: note = Synthetic: >Sparrow-cand-19990-20069
  source 1..80: mol_type = other DNA
gactatctaggtatactacctcccaatctaactgacattacgatctatcggactggtcagttttatgccaatggttatag

SEQ ID NO: 14938 - DNA, 80 bp, synthetic construct
  misc_feature 1..80: note = Synthetic: >Sparrow-cand-20070-20149
  source 1..80: mol_type = other DNA
atacctactaggtacactacctgtcacagtaggactaaagttcgactagaagcgaagcagggctcactaccagcaaattc

SEQ ID NO: 14939 - DNA, 80 bp, synthetic construct
  misc_feature 1..80: note = Synthetic: >Sparrow-cand-20150-20229
  source 1..80: mol_type = other DNA
tgcgcattatgccctagccaacctcactgacactcttataacactcaccaataccactatctcacagatcacttactgtg

SEQ ID NO: 14940 - DNA, 80 bp, synthetic construct
  misc_feature 1..80: note = Synthetic: >Sparrow-cand-20230-20309
  source 1..80: mol_type = other DNA
ataatgacacaatcagtactatagcctgtcagcgttccacacatccactcgctgatggcttttactcacatccaccaacg

SEQ ID NO: 14941 - DNA, 80 bp, synthetic construct
  misc_feature 1..80: note = Synthetic: >Sparrow-cand-20310-20389
  source 1..80: mol_type = other DNA
gccgcccaaacctatcagagaactgttgttacactacctaaacttcaggaagttgaaatagtaaaaattaaaattactgc

SEQ ID NO: 14942 - DNA, 80 bp, synthetic construct
  misc_feature 1..80: note = Synthetic: >Sparrow-cand-20390-20469
  source 1..80: mol_type = other DNA
agatatgaaatatggtcaaaccaaaatcaactctatcaccattaatggaccaccttcctggtccaccgttgagcttgatg

SEQ ID NO: 14943 - DNA, 80 bp, synthetic construct
  misc_feature 1..80: note = Synthetic: >Sparrow-cand-23040-23119
  source 1..80: mol_type = other DNA
atttaaggaatggtagtcgacgactggtctgttaccatccccggtcaatatataattgctatactcgttgtcgtttgcat

SEQ ID NO: 14944 - DNA, 80 bp, synthetic construct
  misc_feature 1..80: note = Synthetic: >Sparrow-cand-23120-23199
  source 1..80: mol_type = other DNA
cgctgtagcactattattcattaacacttgcttagcttgtgtcaaactctcctacaagtgctaccttggcgcagcttatc

SEQ ID NO: 14945 - DNA, 80 bp, synthetic construct
  misc_feature 1..80: note = Synthetic: >Sparrow-cand-23200-23279
  source 1..80: mol_type = other DNA
ttgttagacccattattgtgtactattccaagccaaaccctgtaccagaggaagagtttgtaaaagtacaccaatttcct

SEQ ID NO: 14946 - DNA, 80 bp, synthetic construct
  misc_feature 1..80: note = Synthetic: >Sparrow-cand-23280-23359
  source 1..80: mol_type = other DNA
agaaacactcattatgtctgatccagaagagtggcaaattattgtattcattgcgatcatatgggcgctcggcgtcatcc

SEQ ID NO: 14947 - DNA, 80 bp, synthetic construct
  misc_feature 1..80: note = Synthetic: >Sparrow-cand-23360-23439
  source 1..80: mol_type = other DNA
tccaaggaggctatgccacgcgcaaccgtatgatctatgtgttaaaacttattctactttggctgctccaaccattcacc

SEQ ID NO: 14948 - DNA, 80 bp, synthetic construct
  misc_feature 1..80: note = Synthetic: >Sparrow-cand-23440-23519
  source 1..80: mol_type = other DNA
cttgtggtgactatttgggcagcagtagataatgctaataaaaaggacgctgtgttcattgtgtccataatttttgcagt

SEQ ID NO: 14949 - DNA, 80 bp, synthetic construct
  misc_feature 1..80: note = Synthetic: >Sparrow-cand-23520-23599
  source 1..80: mol_type = other DNA
acttacgttcatttcatgggccaagtactggtacgactcaattcgtttactaatgaaaactagatctgcatgggcactct

SEQ ID NO: 14950 - DNA, 80 bp, synthetic construct
  misc_feature 1..80: note = Synthetic: >Sparrow-cand-23600-23679
  source 1..80: mol_type = other DNA
cacctgagagcagactccttgcaggaattatggatcctatgggcacatggaggtgcattcccatcgaccatatggctcca

SEQ ID NO: 14951 - DNA, 80 bp, synthetic construct
  misc_feature 1..80: note = Synthetic: >Sparrow-cand-23680-23759
  source 1..80: mol_type = other DNA
attctcacaccagtcgttaagcatggcaagctcaagttacatggacaagagctggccaatggcatatcagttagaaaccc

SEQ ID NO: 14952 - DNA, 80 bp, synthetic construct
  misc_feature 1..80: note = Synthetic: >Sparrow-cand-23750-23829
  source 1..80: mol_type = other DNA
ttagaaaccctccgcaggacatggtgattgtgtcaccaagtgacacctttcactacactttcaagaaacctgtggaatca

SEQ ID NO: 14953 - DNA, 80 bp, synthetic construct
  misc_feature 1..80: note = Synthetic: >Sparrow-cand-23990-24069
  source 1..80: mol_type = other DNA
caatgagcggaacatcaaaagagacgatgttcttgagcttattgaccctcttgttaaaactcgctgttttgcttacagtc

SEQ ID NO: 14954 - DNA, 80 bp, synthetic construct
  misc_feature 1..80: note = Synthetic: >Sparrow-cand-24230-24309
  source 1..80: mol_type = other DNA
ttaatattttgacaccaatctatcatggctgctccagtggttcccactactgacgcgtcgtggttccaggtgctcaaagc

SEQ ID NO: 14955 - DNA, 80 bp, synthetic construct
  misc_feature 1..80: note = Synthetic: >HKU18-cand-14520-14599
  source 1..80: mol_type = other DNA
agcttgctacatctaactatgacactattgaaccttatcagaaggccaatcgtgccccattatctcttatgctctttgcc

SEQ ID NO: 14956 - DNA, 80 bp, synthetic construct
  misc_feature 1..80: note = Synthetic: >Sk512R-cand-10900-10979
  source 1..80: mol_type = other DNA
gttgctatgagtttaaagtcagtgccgcagaatttaaatatatggtggctaatggactacgtgcacctactggtgttttt

SEQ ID NO: 14957 - DNA, 80 bp, synthetic construct
  misc_feature 1..80: note = Synthetic: >BtSk_AlphaCoV-cand-10870-10949
  source 1..80: mol_type = other DNA
cgagtttaaagtcagtgccgcagaatttaaatatatggtggctaatggactacgtgcacctactggtgtttttgatgcct

SEQ ID NO: 14958 - DNA, 80 bp, synthetic construct
  misc_feature 1..80: note = Synthetic: >Sb512-cand-10910-10989
  source 1..80: mol_type = other DNA
gctacgagtttaaagtcagcgccgcagaatttaaatatatggtggctaatggactacgtgcacctactggtgtttttgat

SEQ ID NO: 14959 - DNA, 80 bp, synthetic construct
  misc_feature 1..80: note = Synthetic: >BtSk_AlphaCoV-cand-17090-17169
  source 1..80: mol_type = other DNA
atcgtgagttgtttgacatacttaagttctatgaacttaaattgtctgacttgcaagttggtgatggttgtggtcttttt

SEQ ID NO: 14960 - DNA, 80 bp, synthetic construct
  misc_feature 1..80: note = Synthetic: >Sk512R-cand-17120-17199
  source 1..80: mol_type = other DNA
attatgtgtgatcgtgagttgtttgacatacttaagttctatgaacttaaattgtctgacttgcaagttggtgatggttg

SEQ ID NO: 14961 - DNA, 80 bp, synthetic construct
  misc_feature 1..80: note = Synthetic: >Sb512-cand-17140-17219
  source 1..80: mol_type = other DNA
gtgagttgtttgacatacttaagttctatgaacttaaattgtccgacttgcaagttggtgatggttgtggtctttttaaa

SEQ ID NO: 14962 - DNA, 80 bp, synthetic construct
  misc_feature 1..80: note = Synthetic: >HKU17-cand-12990-13069
  source 1..80: mol_type = other DNA
aaaacgtaatgttttgcctacactcactcagatgaaccttaagtatgcaatttcagccaaggatcgtgctcgcactgtgg

SEQ ID NO: 14963 - DNA, 80 bp, synthetic construct
  misc_feature 1..80: note = Synthetic: >HKU20_FJ376622-cand-13150-13229
  source 1..80: mol_type = other DNA
gagtatacaaaacgcaatgttttgcctacactcactcagatgaatctaaaatatgcgatttcagcaaaagatcgtgctcg

SEQ ID NO: 14964 - DNA, 80 bp, synthetic construct
  misc_feature 1..80: note = Synthetic: >Sb512-cand-18280-18359
  source 1..80: mol_type = other DNA
atgattatattactcatggccagttggatggcttgtgcctgttttggaattgcaatgtggacatgtacccagaattttct

SEQ ID NO: 14965 - DNA, 80 bp, synthetic construct
  misc_feature 1..80: note = Synthetic: >AcCoV_JC34-cand-10050-10129
  source 1..80: mol_type = other DNA
atagtgtttattaaacacaagatggtttttctttatggctatgttattccagcgacattggttattgtgtttagcaattt

SEQ ID NO: 14966 - DNA, 80 bp, synthetic construct
  misc_feature 1..80: note = Synthetic: >BtSk_AlphaCoV-cand-20390-20469
  source 1..80: mol_type = other DNA
tgcatgccaattatatattttggcgtaattccactattatgaccatgtcttataatagtgttttagatttaagtaaattt

SEQ ID NO: 14967 - DNA, 80 bp, synthetic construct
  misc_feature 1..80: note = Synthetic: >Sb512-cand-20440-20519
  source 1..80: mol_type = other DNA
acgccaattacatattttggcgtaattccactattatgaccatgtcttataatagtgttttagatttaagtaaattttca

SEQ ID NO: 14968 - DNA, 80 bp, synthetic construct
  misc_feature 1..80: note = Synthetic: >WIV16-cand-12550-12629
  source 1..80: mol_type = other DNA
aaatttggcttggcctcttattgttacagctctaagggccaattcagctgtcaaactacagaataatgaactgagtccag

SEQ ID NO: 14969 - DNA, 80 bp, synthetic construct
  misc_feature 1..80: note = Synthetic: >BtRl_BetaCoV-cand-12510-12589
  source 1..80: mol_type = other DNA
accaaatttggcttggcctcttattgttacagctctaagagccaactcagctgttaaactacagaataatgaactgagtc

SEQ ID NO: 14970 - DNA, 80 bp, synthetic construct
  misc_feature 1..80: note = Synthetic: >HKU4R-cand-5160-5239
  source 1..80: mol_type = other DNA
aatctttgaagcttagcaattataattgttacattaatgcaacaattatgatgattgatatgctacaggatataaaattt

SEQ ID NO: 14971 - DNA, 80 bp, synthetic construct
  misc_feature 1..80: note = Synthetic: >HKU15-cand-8560-8639
  source 1..80: mol_type = other DNA
aacaaaactcatagtggtacagatcttgaaggtaacttctatggcccctatgtggatgaggaagttattcagcaacaaac

SEQ ID NO: 14972 - DNA, 80 bp, synthetic construct
  misc_feature 1..80: note = Synthetic: >MsbCoV1-cand-3120-3199
  source 1..80: mol_type = other DNA
ttgttggtgaattcgtagacctacctgattacttcatctatgatgaggaaggtggtcatgacttaactaacactgttatg

SEQ ID NO: 14973 - DNA, 80 bp, synthetic construct
  misc_feature 1..80: note = Synthetic: >MbCoV1-cand-23500-23579
  source 1..80: mol_type = other DNA
attgtagtgtttatgtttgtaatggaaatcctaggtgtctacagttactgactcagtatgccagtgtctgtagaactgtt

SEQ ID NO: 14974 - DNA, 80 bp, synthetic construct
  misc_feature 1..80: note = Synthetic: >MsbCoV1-cand-23500-23579
  source 1..80: mol_type = other DNA
tgtttatgtttgtaatggaaatcctaggtgtctacagttactgacacagtatgccagtgtctgtagaactgttgaagaac

SEQ ID NO: 14975 - DNA, 80 bp, synthetic construct
  misc_feature 1..80: note = Synthetic: >BtSk_AlphaCoV-cand-25190-25269
  source 1..80: mol_type = other DNA
actgatatagtaccattcgtcagccgaagtaatctctatcttgccattcgtggtagcgctgagtcagatatccaactgtt

SEQ ID NO: 14976 - DNA, 80 bp, synthetic construct
  misc_feature 1..80: note = Synthetic: >Sb512-cand-25250-25329
  source 1..80: mol_type = other DNA
gtactgatatagtaccattcgtcagccgaagtaatctctatcttgccattcgtggtagtgctgagtcagatatccaactg

SEQ ID NO: 14977 - DNA, 80 bp, synthetic construct
  misc_feature 1..80: note = Synthetic: >SEAC-cand-22200-22279
  source 1..80: mol_type = other DNA
tgaccgaacagtttttgcaaactacaatgcctaagttcagcgttagttgcgagacttacatatgtgacgtaagtaaggcg

SEQ ID NO: 14978 - DNA, 80 bp, synthetic construct
  misc_feature 1..80: note = Synthetic: >HKU5R-cand-5200-5279
  source 1..80: mol_type = other DNA
tggcactggttaagagatggaagtatacggtgcatgatggtgttaaatcccttaagctcaatagcaacaattgttatgtt

SEQ ID NO: 14979 - DNA, 80 bp, synthetic construct
  misc_feature 1..80: note = Synthetic: >SEAC-cand-12010-12089
  source 1..80: mol_type = other DNA
ttgcaggctggtaaacagactgagctagcatgcaattcttctttgctcactctttgcgcttttgctgttgaccctgctaa

SEQ ID NO: 14980 - DNA, 80 bp, synthetic construct
  misc_feature 1..80: note = Synthetic: >HghCoV1-cand-1000-1079
  source 1..80: mol_type = other DNA
atatagagttgtttggtttactgagcgcaaggacgttgattatagtaaacaaacactctttacagtgatctgtgtgatgc

SEQ ID NO: 14981 - DNA, 80 bp, synthetic construct
  misc_feature 1..80: note = Synthetic: >229ER-cand-15520-15599
  source 1..80: mol_type = other DNA
ccacatctttcatttccactgtgttcagctggtaatgtatttggtttgtacaaaagttctgctttgggttccatagacgt

SEQ ID NO: 14982 - DNA, 80 bp, synthetic construct
  misc_feature 1..80: note = Synthetic: >SEAC-cand-25000-25079
  source 1..80: mol_type = other DNA
tggtggttcttctccttcagcattctgatgcttgtcataacgctagttctctggcttatgtacataattaatagttttaa

SEQ ID NO: 14983 - DNA, 80 bp, synthetic construct
  misc_feature 1..80: note = Synthetic: >229ER-cand-3120-3199
  source 1..80: mol_type = other DNA
gtttttgtaaaactattcaatcagcactttctgttgtttcaggctatgtaaacctacctacatattacatctatgatgag

SEQ ID NO: 14984 - DNA, 80 bp, synthetic construct
  misc_feature 1..80: note = Synthetic: >HKU10R-cand-21890-21969
  source 1..80: mol_type = other DNA
atttttaatgtcactagtagtgtgggttctgatttttggactgttgcttttgctgatgaagctgaagttttattggagtt

SEQ ID NO: 14985 - DNA, 80 bp, synthetic construct
  misc_feature 1..80: note = Synthetic: >HKU5R-cand-10240-10319
  source 1..80: mol_type = other DNA
tcttccagccacccaattgcagtgtcacctcaagtgtgttgcagagtggtctggttaagatggctgctcccagtggagtt

SEQ ID NO: 14986 - DNA, 80 bp, synthetic construct
  misc_feature 1..80: note = Synthetic: >SARSRC-cand-1440-1519
  source 1..80: mol_type = other DNA
aactcgactccgcaagggaggtaggactaaatgttttggaggctgtgtgttttcctatgttggctgctataacaagcgtg

SEQ ID NO: 14987 - DNA, 80 bp, synthetic construct
  misc_feature 1..80: note = Synthetic: >BtRl_BetaCoV-cand-1430-1509
  source 1..80: mol_type = other DNA
atattgaaactcgactccgcaagggaggtaggactaaatgttttggaggttgcgtgttttcctatgtgggctgctataac

SEQ ID NO: 14988 - DNA, 80 bp, synthetic construct
  misc_feature 1..80: note = Synthetic: >HKU4R-cand-1720-1799
  source 1..80: mol_type = other DNA
tacagaggttgttttagcaatactgtctggtacgacatccacttttgaagagttgcgtgacttgtgtcataacgcgagtt

SEQ ID NO: 14989 - DNA, 80 bp, synthetic construct
  misc_feature 1..80: note = Synthetic: >BetaSp-cand-22850-22929
  source 1..80: mol_type = other DNA
agactgaactcgtttttagatatggctaacatttgcagtctcaaccataggcctgctttgcctcctcgttggtgttatag

SEQ ID NO: 14990 - DNA, 80 bp, synthetic construct
  misc_feature 1..80: note = Synthetic: >HKU4R-cand-13070-13149
  source 1..80: mol_type = other DNA
cttaataatttacatagaggccaactcttagggcatatagctgcaactgtacgtttgcaagctggtgctaatacagagtt

SEQ ID NO: 14991 - DNA, 80 bp, synthetic construct
  misc_feature 1..80: note = Synthetic: >SEAC-cand-24200-24279
  source 1..80: mol_type = other DNA
atgctttttgttacaggagttttgcttttgttctctttaatgcaccgacactgtgcttcatcaacggcaccgtttgtctc

SEQ ID NO: 14992 - DNA, 80 bp, synthetic construct
  misc_feature 1..80: note = Synthetic: >BetaSp-cand-28860-28939
  source 1..80: mol_type = other DNA
ggctgtagacaacattcgattggtttacactcgtgcatttgatgtttacaacctagagagttattgttccatttttggat

SEQ ID NO: 14993 - DNA, 80 bp, synthetic construct
  misc_feature 1..80: note = Synthetic: >HKU5R-cand-24640-24719
  source 1..80: mol_type = other DNA
cgtctttcgcagcaataccatttgcacaaagtatcttttatcgcttgaatggtgttggcatcactcagcaggttctgtct

SEQ ID NO: 14994 - DNA, 80 bp, synthetic construct
  misc_feature 1..80: note = Synthetic: >HKU14-cand-24820-24899
  source 1..80: mol_type = other DNA
ataagtcggtgccctctccattaaattgggaacgtaagactttttcaaattgtaattttaacatgagcagcttgatgtct

SEQ ID NO: 14995 - DNA, 80 bp, synthetic construct
  misc_feature 1..80: note = Synthetic: >HKU23-cand-24660-24739
  source 1..80: mol_type = other DNA
tcggtgccctctccattaaattgggaacgtaagaccttttcaaattgtaattttaatatgagcagcctgatgtcttctat

SEQ ID NO: 14996 - DNA, 80 bp, synthetic construct
  misc_feature 1..80: note = Synthetic: >Sk512R-cand-20400-20479
  source 1..80: mol_type = other DNA
ccaccaatgccatcattgatggtaatattatgcacgccaattacatattttggcgtaattccactattatgaccatgtct

SEQ ID NO: 14997 - DNA, 80 bp, synthetic construct
  misc_feature 1..80: note = Synthetic: >HKU5R-cand-12870-12949
  source 1..80: mol_type = other DNA
tggccacttgttttggaatgcacacgcgctgcaagctctgctgtcacgttgcaaaataatgagatcaggccatctggtct

SEQ ID NO: 14998 - DNA, 80 bp, synthetic construct
  misc_feature 1..80: note = Synthetic: >HKU5-cand-12880-12959
  source 1..80: mol_type = other DNA
ttgttttggaatgcacacgcgctgcaagttctgctgtcacgttgcaaaataatgagatcaggccatctggtctaaaaact

SEQ ID NO: 14999 - DNA, 80 bp, synthetic construct
  misc_feature 1..80: note = Synthetic: >HghCoV1-cand-16130-16209
  source 1..80: mol_type = other DNA
agcggtttgtgtctttggctatagatgcttaccctctaacaaagcatgataatatagaataccaaaatgtattctgggtc

SEQ ID NO: 15000 - DNA, 80 bp, synthetic construct
  misc_feature 1..80: note = Synthetic: >HKU5R-cand-16800-16879
  source 1..80: mol_type = other DNA
ctacttgtgactggactgaaagtggtgactacaccttagctaataccactacagaaccactaaaattatttgcggctgaa

SEQ ID NO: 15001 - DNA, 80 bp, synthetic construct
  misc_feature 1..80: note = Synthetic: >BetaSp-cand-21970-22049
  source 1..80: mol_type = other DNA
agcctagtaaatgttagtaatctaaactgaaatggctgtggcatatgctgacaagccaactcattttattaattttccgc

SEQ ID NO: 15002 - DNA, 80 bp, synthetic construct
  misc_feature 1..80: note = Synthetic: >HKU5R-cand-12070-12149
  source 1..80: mol_type = other DNA
gtgtccagtcaaaacttactgatcttaaatgcacatctgtggttcttctctctgttcttcaacagttacatcttgaggct

SEQ ID NO: 15003 - DNA, 80 bp, synthetic construct
  misc_feature 1..80: note = Synthetic: >HKU5-cand-13360-13439
  source 1..80: mol_type = other DNA
gcgctccattgactaattgtgttaagatgttaactcctaagactggtactggaattgcagtgtctgtcaaaccggaggct

SEQ ID NO: 15004 - DNA, 80 bp, synthetic construct
  misc_feature 1..80: note = Synthetic: >HKU5R-cand-13350-13429
  source 1..80: mol_type = other DNA
gcaggtggtgctccattgactaattgtgttaagatgttaactccgaagactggtactggaattgcagtgtctgtcaaacc

SEQ ID NO: 15005 - DNA, 80 bp, synthetic construct
  misc_feature 1..80: note = Synthetic: >229ER-cand-15600-15679
  source 1..80: mol_type = other DNA
tgatgtctttaataagctttctacttctgattggtctgacattcgtgattataagttagctaatgaagctaaggagtcat

SEQ ID NO: 15006 - DNA, 80 bp, synthetic construct
  misc_feature 1..80: note = Synthetic: >WIV16-cand-6490-6569
  source 1..80: mol_type = other DNA
ggaaaatacaagcattaccattaagaaacctaatgagctttcactagccttaggtttaaaaacaattgccactcatggta

SEQ ID NO: 15007 - DNA, 80 bp, synthetic construct
  misc_feature 1..80: note = Synthetic: >HKU24-cand-5310-5389
  source 1..80: mol_type = other DNA
ttgttgtaggtgggaggtcgtggtccatcgcaaatggttttgttttaagcaggcagacaataattgttattgtaatgctg

SEQ ID NO: 15008 - DNA, 80 bp, synthetic construct
  misc_feature 1..80: note = Synthetic: >BetaSp-cand-5640-5719
  source 1..80: mol_type = other DNA
tgttgtaagtgggaggttgtggtccagcgcaaatggttttgttttaagcaggcagacaataattgttattgtaatgctgc

SEQ ID NO: 15009 - DNA, 80 bp, synthetic construct
  misc_feature 1..80: note = Synthetic: >Quail-cand-8580-8659
  source 1..80: mol_type = other DNA
cagcatttcagtattacactgataatgttgtagcgcaactctatgcacacttgctgactgttgatgccagacctaaatgg

SEQ ID NO: 15010 - DNA, 80 bp, synthetic construct
  misc_feature 1..80: note = Synthetic: >AlphaMink-cand-15840-15919
  source 1..80: mol_type = other DNA
tgataggtaaacagaagtttacaaccatacaaggtcctcctggttctggcaagtcacattgtgttattggtttagggctg

SEQ ID NO: 15011 - DNA, 80 bp, synthetic construct
  misc_feature 1..80: note = Synthetic: >MinkCoV1-cand-15870-15949
  source 1..80: mol_type = other DNA
ggtaaacagaagtttacaaccatacaaggtcctcctggttctggcaagtcacattgtgttattggcttggggctgtatta

SEQ ID NO: 15012 - DNA, 80 bp, synthetic construct
  misc_feature 1..80: note = Synthetic: >SEAC-cand-11930-12009
  source 1..80: mol_type = other DNA
tcaagtacctttattatgttaagaatcttaacaatttgcgtagaggtgctactttaggctacataggtgctactgttagg

SEQ ID NO: 15013 - DNA, 80 bp, synthetic construct
  misc_feature 1..80: note = Synthetic: >BtRl_BetaCoV-cand-11240-11319
  source 1..80: mol_type = other DNA
cagctcgcactgtttatgatgatgctgctagacgtgtttggacactgatgaatgtcattacacttgtttacaaagtctac

SEQ ID NO: 15014 - DNA, 80 bp, synthetic construct
  misc_feature 1..80: note = Synthetic: >WIV16-cand-11270-11349
  source 1..80: mol_type = other DNA
ctcatgacagctcgcactgtttatgatgatgctgctagacgtgtttggacactgatgaatgtcattacacttgtttacaa

SEQ ID NO: 15015 - DNA, 80 bp, synthetic construct
  misc_feature 1..80: note = Synthetic: >Quail-cand-24270-24349
  source 1..80: mol_type = other DNA
gggttaagggtccgggagcagacacttctattaagcctcatgttgccaaacgcaaccccaacaatcctaaacatcagctg

SEQ ID NO: 15016 - DNA, 80 bp, synthetic construct
  misc_feature 1..80: note = Synthetic: >HKU17-cand-11520-11599
  source 1..80: mol_type = other DNA
tggtatatttttaagcaccaagactaactgcgctcggtttaaaactgtccgcagtgctttgcctttacctaacaaagggg

SEQ ID NO: 15017 - DNA, 80 bp, synthetic construct
  misc_feature 1..80: note = Synthetic: >HKU5R-cand-90-169
  source 1..80: mol_type = other DNA
ccctgctggtttgcgtgctgcgatacctttctgctgcgtcataggcgccggactggaaagcgcatgtacaccactgggta

SEQ ID NO: 15018 - DNA, 80 bp, synthetic construct
  misc_feature 1..80: note = Synthetic: >Sb512-cand-2140-2219
  source 1..80: mol_type = other DNA
gcggagctatgtgtcaaggttgacactttgctctttaattatgacaagatttataaaaagtacagtaccattattaaggg

SEQ ID NO: 15019 - DNA, 80 bp, synthetic construct
  misc_feature 1..80: note = Synthetic: >Sk512R-cand-2130-2209
  source 1..80: mol_type = other DNA
gttgcggagctatgtgtcaaggttgacactttgctctttaattatgacaagatttataaaaagtacagtaccattattaa

SEQ ID NO: 15020 - DNA, 80 bp, synthetic construct
  misc_feature 1..80: note = Synthetic: >HKU17-cand-15580-15659
  source 1..80: mol_type = other DNA
ccgaactcaagacagtgttacaagaccattgtgaactttggtcctggagacattgctcatgagggacaatctgcctacaa

SEQ ID NO: 15021 - DNA, 80 bp, synthetic construct
  misc_feature 1..80: note = Synthetic: >MinkCoV1-cand-16270-16349
  source 1..80: mol_type = other DNA
ccgcaccacgtacattgataaacaagggagttctaaaaccgcaggattataatgttataacacaacgtatgtgtacatta

SEQ ID NO: 15022 - DNA, 80 bp, synthetic construct
  misc_feature 1..80: note = Synthetic: >AlphaMink-cand-16240-16319
  source 1..80: mol_type = other DNA
gttaccggcaccacgtacattgataaacaaaggagttctaaaaccgcaggattataatgttataacacaacgtatgtgta

SEQ ID NO: 15023 - DNA, 80 bp, synthetic construct
  misc_feature 1..80: note = Synthetic: >HKU5R-cand-28490-28569
  source 1..80: mol_type = other DNA
ccggctgtttatgcgtactggctcctggtggtccttcaaccctgagtctaactgtctacttaatgttcccatcggaggca

SEQ ID NO: 15024 - DNA, 80 bp, synthetic construct
  misc_feature 1..80: note = Synthetic: >HKU10R-cand-17430-17509
  source 1..80: mol_type = other DNA
ttaggtatggatgttgaaggcgctcatgttgtaggcgacaacatcggtactaacgtacctttgcaggtgggtttttctaa

SEQ ID NO: 15025 - DNA, 80 bp, synthetic construct
  misc_feature 1..80: note = Synthetic: >AJ311317-cand-12090-12169
  source 1..80: mol_type = other DNA
ctgtgtgtctctattgtagagcacacatagcacatccaggaagtgtaggaaatttagatggacgttgtcaatttaaaggt

SEQ ID NO: 15026 - DNA, 80 bp, synthetic construct
  misc_feature 1..80: note = Synthetic: >MN307884-cand-12090-12169
  source 1..80: mol_type = other DNA
ctgtgtgtctctattgcagggcacatatagctcacccgggaagtgcaggaaatttagatggacgttgtcaatttaaaggt

SEQ ID NO: 15027 - DNA, 80 bp, synthetic construct
  misc_feature 1..80: note = Synthetic: >AJ311317-cand-5920-5999
  source 1..80: mol_type = other DNA
acgatattgtgcagatgattttatttgtcgtgtgtgtttacatgacaaagattcacttcatttgtacaaacacgcttata

SEQ ID NO: 15028 - DNA, 80 bp, synthetic construct
  misc_feature 1..80: note = Synthetic: >KU556805-cand-5910-5989
  source 1..80: mol_type = other DNA
acgctattgtgcagatgattttacctgtcgtgtttgtttacacggtaaggattcacttcatttgtacaaacacgcttata

SEQ ID NO: 15029 - DNA, 80 bp, synthetic construct
  misc_feature 1..80: note = Synthetic: >MN307884-cand-320-399
  source 1..80: mol_type = other DNA
cacttcagaggtacgttctgttgtgtgaaacacggggtcacctccccccacattcctctaagggcttttgagcctagcgt

SEQ ID NO: 15030 - DNA, 80 bp, synthetic construct
  misc_feature 1..80: note = Synthetic: >MN307884-cand-13290-13369
  source 1..80: mol_type = other DNA
actaataccacaaacttcttttggtaatttatgtagaaaagtgttcgttgatggtgtaccatttatagctacttgtggct

SEQ ID NO: 15031 - DNA, 80 bp, synthetic construct
  misc_feature 1..80: note = Synthetic: >AY692454-cand-13290-13369
  source 1..80: mol_type = other DNA
acttataccgcagacttctttcggtaatttgtgtagaaaagtttttgttgatggtgtaccatttatagctacttgtggct

SEQ ID NO: 15032 - DNA, 80 bp, synthetic construct
  misc_feature 1..80: note = Synthetic: >MN517816-cand-8490-8569
  source 1..80: mol_type = other DNA
gcattgctggcttgtgtttacttttggtttaatagtgcctatgtggatagcctgttgctatttggcatttgtactttatg

SEQ ID NO: 15033 - DNA, 80 bp, synthetic construct
  misc_feature 1..80: note = Synthetic: >MN690609-cand-180-259
  source 1..80: mol_type = other DNA
catagttcaggcgacccctctcccaccgccattcggtgtgacagccttgggccttctacctggatattgtttgggtgggg

SEQ ID NO: 15034 - DNA, 80 bp, synthetic construct
  misc_feature 1..80: note = Synthetic: >MN531555-cand-5290-5369
  source 1..80: mol_type = other DNA
ttgacacctgataatgacgaaaattcaaaagcaccaatctactacccagtcttagactctgttagtcttaaggctatatg

SEQ ID NO: 15035 - DNA, 80 bp, synthetic construct
  misc_feature 1..80: note = Synthetic: >MN307884-cand-12330-12409
  source 1..80: mol_type = other DNA
ttgataagaattatttaaacgggtacggggtagcagtgaggctcggctgataccccttgctaatggttgtgaacctgatg

SEQ ID NO: 15036 - DNA, 80 bp, synthetic construct
  misc_feature 1..80: note = Synthetic: >MT114541-cand-25840-25919
  source 1..80: mol_type = other DNA
ctatgatgcctataagaattttatgcgaattaaagcatacaaccccaacgaagcactccttgtttgaactaaacaaaatg

SEQ ID NO: 15037 - DNA, 80 bp, synthetic construct
  misc_feature 1..80: note = Synthetic: >MN128086-cand-9610-9689
  source 1..80: mol_type = other DNA
tataataggtgggctggtgataatggttttacaccattttctactagtactgctattactaaattaagtgctattacggg

SEQ ID NO: 15038 - DNA, 80 bp, synthetic construct
  misc_feature 1..80: note = Synthetic: >MN690608-cand-660-739
  source 1..80: mol_type = other DNA
tccattggagaagttcattgtggggataaggtccttaaatttatcaagaaccccgttgtaggtattgtttgtaatgaagg

SEQ ID NO: 15039 - DNA, 80 bp, synthetic construct
  misc_feature 1..80: note = Synthetic: >MT114541-cand-21760-21839
  source 1..80: mol_type = other DNA
tatggtcaacccatagcttcaacattaagtaacatcacattaccaatgcaggataataatactgatgtgtactgtattcg

SEQ ID NO: 15040 - DNA, 80 bp, synthetic construct
  misc_feature 1..80: note = Synthetic: >SBB-010-cand-18720-18799
  source 1..80: mol_type = other DNA
accactctgtattctcaagaatttaggtgttgtgtgcactgacagatttgttttgtgggactgtgaagctgagagacctt

SEQ ID NO: 15041 - DNA, 80 bp, synthetic construct
  misc_feature 1..80: note = Synthetic: >SBB-130-cand-18720-18799
  source 1..80: mol_type = other DNA
actctgtattctcaagaatttaggtgttgtgtgtactgacagatttgttttgtgggactatgaagctgagagacctttta

SEQ ID NO: 15042 - DNA, 80 bp, synthetic construct
  misc_feature 1..80: note = Synthetic: >SBB-041-cand-18710-18789
  source 1..80: mol_type = other DNA
gtttgacaccaccactctgtattctcaagaatctaggtgttgtgtgtactgacagatttgttttgtgggactatgaagct

SEQ ID NO: 15043 - DNA, 80 bp, synthetic construct
  misc_feature 1..80: note = Synthetic: >SBB-130-cand-4590-4669
  source 1..80: mol_type = other DNA
tttatgatgttgctattgctgacattgtgatgctcaagcccgatagatttgtgttttacaccaatcagaatttcgtactt

SEQ ID NO: 15044 - DNA, 80 bp, synthetic construct
  misc_feature 1..80: note = Synthetic: >SBB-041-cand-4600-4679
  source 1..80: mol_type = other DNA
tgttgctattgctgacattgtgatgctcaagcctgatagacttgtgttctacaccaatcagaatttcgcacttgatggta

SEQ ID NO: 15045 - DNA, 80 bp, synthetic construct
  misc_feature 1..80: note = Synthetic: >SBB-010-cand-4590-4669
  source 1..80: mol_type = other DNA
atttttatgatgttgctattgctgacattgtggcgctcaaacctgatagacttgtgttctacaccaatcagaatttcgca

SEQ ID NO: 15046 - DNA, 80 bp, synthetic construct
  misc_feature 1..80: note = Synthetic: >SBB-053-cand-1960-2039
  source 1..80: mol_type = other DNA
aattggtggtttaacctttttccatagtgatggttattacagactcatgagtgagtttgacactgttttaaatgaaccag

SEQ ID NO: 15047 - DNA, 80 bp, synthetic construct
  misc_feature 1..80: note = Synthetic: >SBB-120-cand-1950-2029
  source 1..80: mol_type = other DNA
cttctgttataattggtggtttaacctttttccatagtggtggttattacagactcatgagtgagtttgacactgtttta

SEQ ID NO: 15048 - DNA, 80 bp, synthetic construct
  misc_feature 1..80: note = Synthetic: >SBB-122-cand-1960-2039
  source 1..80: mol_type = other DNA
aattggtggtttaacctttttccatagtggtggttattacagactcatgagtgagtttgacactgttttgaatgaaccag

SEQ ID NO: 15049 - DNA, 80 bp, synthetic construct
  misc_feature 1..80: note = Synthetic: >SBB-130-cand-4030-4109
  source 1..80: mol_type = other DNA
acaacatgctaatattaccttctaccaaggcgatttgacggaggttatgtctgctaagcatgactttgttgtcaatgccg

SEQ ID NO: 15050 - DNA, 80 bp, synthetic construct
  misc_feature 1..80: note = Synthetic: >SBB-788-cand-4400-4479
  source 1..80: mol_type = other DNA
agctatgccaaccagaggccttaattaaggtcttgactacggtggacggtattaattataacactgtttttgtttctggt

SEQ ID NO: 15051 - DNA, 80 bp, synthetic construct
  misc_feature 1..80: note = Synthetic: >SBB-747-cand-9110-9189
  source 1..80: mol_type = other DNA
tggttgtatttagtaggcatattttgtggtttgctagtttgtgtactaagcgtaccgtgcatgttggtgaccttgtgttt

SEQ ID NO: 15052 - DNA, 80 bp, synthetic construct
  misc_feature 1..80: note = Synthetic: >SBB-797-cand-9120-9199
  source 1..80: mol_type = other DNA
tagtaggcatattttgtggtttgccagtttgtgtactaagcgtaccgtgcatgttggtgaccttgtgtttcattcttttc

SEQ ID NO: 15053 - DNA, 80 bp, synthetic construct
  misc_feature 1..80: note = Synthetic: >SBB-788-cand-6960-7039
  source 1..80: mol_type = other DNA
taatggtgttaaacgtattttttacgttaatgctaatggtggcacgtatttttgcactaagcacaattggaattgtgttt

SEQ ID NO: 15054 - DNA, 80 bp, synthetic construct
  misc_feature 1..80: note = Synthetic: >SBB-747-cand-6950-7029
  source 1..80: mol_type = other DNA
ctactgtcgttaatggtgttaaacgtattttttacgttaatgctaatggtggcacgtatttttgcactaagcacaattgg

SEQ ID NO: 15055 - DNA, 80 bp, synthetic construct
  misc_feature 1..80: note = Synthetic: >SBB-726-cand-6970-7049
  source 1..80: mol_type = other DNA
aaacgtattttttacgttaatgctaatggtggcacgtatttttgcactaagcacaattggaattgtgtttcatgtgatac

SEQ ID NO: 15056 - DNA, 80 bp, synthetic construct
  misc_feature 1..80: note = Synthetic: >SBB-041-cand-24630-24709
  source 1..80: mol_type = other DNA
ttttataaaactcattcaactttgctttgcttgccaccgtttaatgtctcacacggtttatgtgcccgtgtacggtgttt

SEQ ID NO: 15057 - DNA, 80 bp, synthetic construct
  misc_feature 1..80: note = Synthetic: >SBB-010-cand-24640-24719
  source 1..80: mol_type = other DNA
attacttttataaaactcattcaactttgctttgcttgtcaccgtctaatgtctcacacggtttatgtgcccgtgtacgg

SEQ ID NO: 15058 - DNA, 80 bp, synthetic construct
  misc_feature 1..80: note = Synthetic: >SBB-747-cand-7510-7589
  source 1..80: mol_type = other DNA
aaacacctttatactactgctttgcaacaaatcgcctccggcatgactgtagaggcagttttgaaagtgtttgtgggatc

SEQ ID NO: 15059 - DNA, 80 bp, synthetic construct
  misc_feature 1..80: note = Synthetic: >SBB-726-cand-5600-5679
  source 1..80: mol_type = other DNA
atcctaacatagctggtgatgtagtggccatttcagatgataatgtgactgcccatccatatggttctttgcatatgggt

SEQ ID NO: 15060 - DNA, 80 bp, synthetic construct
  misc_feature 1..80: note = Synthetic: >SBB-747-cand-3430-3509
  source 1..80: mol_type = other DNA
cttgttaggaatgttacttgcgagacatacgtggttgtttatgatcgtcaattataccagcgggctttgtccacttcttt

SEQ ID NO: 15061 - DNA, 80 bp, synthetic construct
  misc_feature 1..80: note = Synthetic: >SBB-788-cand-3440-3519
  source 1..80: mol_type = other DNA
atgttacttgcgagacatacgtggttgtttatgatcgtcaattataccggcgggctttgtccacttcttttgacgaccct

SEQ ID NO: 15062 - DNA, 80 bp, synthetic construct
  misc_feature 1..80: note = Synthetic: >SBB-788-cand-9920-9999
  source 1..80: mol_type = other DNA
aagaagttcagttttgttatcagcaccaattggagttgccaaatggcacacacactggtactgatatgtcgggtgtcttt

SEQ ID NO: 15063 - DNA, 80 bp, synthetic construct
  misc_feature 1..80: note = Synthetic: >SBB-726-cand-9910-9989
  source 1..80: mol_type = other DNA
atgaatggtaaagaagttcagttttgttatcagcaccaattggagttgccaaatggcacacacactggtactgatatgtc

SEQ ID NO: 15064 - DNA, 80 bp, synthetic construct
  misc_feature 1..80: note = Synthetic: >SBB-120-cand-16920-16999
  source 1..80: mol_type = other DNA
ttttgattcgcttaaattctttgaggttaaactctcagacttacaagctggagaaggttgtggcctctttaaagattgtt

SEQ ID NO: 15065 - DNA, 80 bp, synthetic construct
  misc_feature 1..80: note = Synthetic: >SBB-053-cand-16910-16989
  source 1..80: mol_type = other DNA
ataaagagctttttgattcccttaagttctttgaggttaaactctcagacttacaagctggagaaggttgtggcctcttt

SEQ ID NO: 15066 - DNA, 80 bp, synthetic construct
  misc_feature 1..80: note = Synthetic: >SBB-024-cand-13250-13329
  source 1..80: mol_type = other DNA
gtcaggattatcaccctaattgtgtagactgtcatgatgaaatgtgtgttgttcactgtgctaattttaacacactcttt

SEQ ID NO: 15067 - DNA, 80 bp, synthetic construct
  misc_feature 1..80: note = Synthetic: >SBB-726-cand-9830-9909
  source 1..80: mol_type = other DNA
tttacacttgtacattgcggtccaatggtacactaaaggcctcatttttgtgtgggtcttgtggtagtccaggatttgtt

SEQ ID NO: 15068 - DNA, 80 bp, synthetic construct
  misc_feature 1..80: note = Synthetic: >SBB-788-cand-9840-9919
  source 1..80: mol_type = other DNA
tacattgcggtccaatggtacactaaaagcctcatttttgtgtgggtcttgtggtagtccaggatttgttatgaatggta

SEQ ID NO: 15069 - DNA, 80 bp, synthetic construct
  misc_feature 1..80: note = Synthetic: >SBB-041-cand-10910-10989
  source 1..80: mol_type = other DNA
aaggaatgggcttattgtgtggatttgcacaacaagattaatctttgtgatgacccagaagttgctcaggagttattgtt

SEQ ID NO: 15070 - DNA, 80 bp, synthetic construct
  misc_feature 1..80: note = Synthetic: >SBB-130-cand-10900-10979
  source 1..80: mol_type = other DNA
taacacaaaggaatgggcttattgtgtggatttgcacaacaagattaatctctgtgatgacccagaagttgctcaggagt

SEQ ID NO: 15071 - DNA, 80 bp, synthetic construct
  misc_feature 1..80: note = Synthetic: >SBB-010-cand-26950-27029
  source 1..80: mol_type = other DNA
tcaccgcatctatgtaagggcaatgttttcagatagtttagttcttatactgcttctgttctttctatttctaacttgtt

SEQ ID NO: 15072 - DNA, 80 bp, synthetic construct
  misc_feature 1..80: note = Synthetic: >SBB-053-cand-26940-27019
  source 1..80: mol_type = other DNA
ttcaccgcatctatgtaagggcaatgtttttagatagtttagttcttatactgcttctgttctttctatttctaacttgt

SEQ ID NO: 15073 - DNA, 80 bp, synthetic construct
  misc_feature 1..80: note = Synthetic: >SBB-130-cand-26950-27029
  source 1..80: mol_type = other DNA
gattcaccgcatctatgtaagggcaatgtttttagatagtttagttcttatactgcttctgttctttctatttctaactt

SEQ ID NO: 15074 - DNA, 80 bp, synthetic construct
  misc_feature 1..80: note = Synthetic: >SBB-747-cand-7110-7189
  source 1..80: mol_type = other DNA
taaaaggcccataatacacactgatgaagcttattatgaggttacatctgttgaggttcgtaatggttacgtttattgtt

SEQ ID NO: 15075 - DNA, 80 bp, synthetic construct
  misc_feature 1..80: note = Synthetic: >SBB-797-cand-7120-7199
  source 1..80: mol_type = other DNA
ataatacacaccgatgaagcttattatgaggttacatctgttgaggttcgtaatggttacgtttattgttactttgatag

SEQ ID NO: 15076 - DNA, 80 bp, synthetic construct
  misc_feature 1..80: note = Synthetic: >SBB-726-cand-7130-7209
  source 1..80: mol_type = other DNA
ctgatgaagcttattatgaggttacatctgttgaggttcgtaatggttacgtttattgttactttgatagtgacggtgaa

SEQ ID NO: 15077 - DNA, 80 bp, synthetic construct
  misc_feature 1..80: note = Synthetic: >SBB-024-cand-12470-12549
  source 1..80: mol_type = other DNA
cagatcattgtgttcgtgcctttgacatctataacaaggatgttgcatgtctgtgcaagtttctgaaagtcaattgtgtt

SEQ ID NO: 15078 - DNA, 80 bp, synthetic construct
  misc_feature 1..80: note = Synthetic: >SBB-788-cand-2720-2799
  source 1..80: mol_type = other DNA
tttatgaaaaactgtctgatttattttctgagtgccctgctgagctccgacctatagatttagaggagttcatggcatca

SEQ ID NO: 15079 - DNA, 80 bp, synthetic construct
  misc_feature 1..80: note = Synthetic: >SBB-053-cand-2520-2599
  source 1..80: mol_type = other DNA
gtattgttatcagaacaacaaagcgatttaagcgttgtgcagctgttcttgttaatttgtacagagagttcgttgcttct

SEQ ID NO: 15080 - DNA, 80 bp, synthetic construct
  misc_feature 1..80: note = Synthetic: >SBB-120-cand-2510-2589
  source 1..80: mol_type = other DNA
gacctgagtggtattgttatcagaacaacaaagcgttttaaacgttgtgcagctgttcttgttaatctgtacagagagtt

SEQ ID NO: 15081 - DNA, 80 bp, synthetic construct
  misc_feature 1..80: note = Synthetic: >SBB-726-cand-4000-4079
  source 1..80: mol_type = other DNA
aactcttttggtaagcaattgattatgataccttttggttttatagtcaatggccacacccttgccgtatcagccgttag

SEQ ID NO: 15082 - DNA, 80 bp, synthetic construct
  misc_feature 1..80: note = Synthetic: >SBB-747-cand-3990-4069
  source 1..80: mol_type = other DNA
caaagctttgaactcttttggtaagcaattgattatgataccttttggttttatagtcaatggccacacccttgccgtat

SEQ ID NO: 15083 - DNA, 80 bp, synthetic construct
  misc_feature 1..80: note = Synthetic: >SBB-726-cand-4160-4239
  source 1..80: mol_type = other DNA
ggtcttttagtggtgacactactgctttacaggacttcatcgttgatgtattagtcaatggtgccggcgagtgggaagtt

SEQ ID NO: 15084 - DNA, 80 bp, synthetic construct
  misc_feature 1..80: note = Synthetic: >SBB-747-cand-4150-4229
  source 1..80: mol_type = other DNA
tattttaatgggttttttagtggtgacactactgctttacaggacttcatcgttgatgtattagtcaatggtgccggcga

SEQ ID NO: 15085 - DNA, 80 bp, synthetic construct
  misc_feature 1..80: note = Synthetic: >SBB-120-cand-180-259
  source 1..80: mol_type = other DNA
tgttccgtcaccaatcacacaccacaagcaccctctgctagttccgtctagtagagtgcgtggatatcaagttctgtctt

SEQ ID NO: 15086 - DNA, 80 bp, synthetic construct
  misc_feature 1..80: note = Synthetic: >SBB-726-cand-880-959
  source 1..80: mol_type = other DNA
aaggatgatggttatgacctaccaggtggttttgtgaaaattgccgtaacggtcatacgcaagcctgtggctgttgtaaa

SEQ ID NO: 15087 - DNA, 80 bp, synthetic construct
  misc_feature 1..80: note = Synthetic: >SBB-747-cand-870-949
  source 1..80: mol_type = other DNA
tgattacagaaaggatgatggttatgacctaccaggtggttttgtgaaaattgccgtaacggtcatacgcaagcctgtgg

SEQ ID NO: 15088 - DNA, 80 bp, synthetic construct
  misc_feature 1..80: note = Synthetic: >SBB-747-cand-7670-7749
  source 1..80: mol_type = other DNA
aaggatgggactggtctactgactcttggaacaatttagttccgacgtatataaagcaagatactttgagtactcttgaa

SEQ ID NO: 15089 - DNA, 80 bp, synthetic construct
  misc_feature 1..80: note = Synthetic: >SBB-788-cand-7680-7759
  source 1..80: mol_type = other DNA
ctggtctactgattcttggaacaatttagttccgacgtatataaagcaagatactttgagtactcttgaagttggtcagt

SEQ ID NO: 15090 - DNA, 80 bp, synthetic construct
  misc_feature 1..80: note = Synthetic: >SBB-726-cand-7690-7769
  source 1..80: mol_type = other DNA
gactcttggaacaatttagttccgacgtatataaagcaagatactttgagtactcttgaagttggtcagtttatgactgc

SEQ ID NO: 15091 - DNA, 80 bp, synthetic construct
  misc_feature 1..80: note = Synthetic: >SBB-788-cand-13040-13119
  source 1..80: mol_type = other DNA
attggattcttactttgtagttaagcgccatactgaaagtaattatttgcttgaacagcgttgctatgagaagcttaagg

SEQ ID NO: 15092 - DNA, 80 bp, synthetic construct
  misc_feature 1..80: note = Synthetic: >SBB-747-cand-13030-13109
  source 1..80: mol_type = other DNA
aaggcaaccaattggattcttactttgtagttaagcgccatactgaaagtaattatttgcttgaacagcgttgttatgag

SEQ ID NO: 15093 - DNA, 80 bp, synthetic construct
  misc_feature 1..80: note = Synthetic: >SBB-747-cand-4950-5029
  source 1..80: mol_type = other DNA
ggcacgccgtgtgatgcagactgtttgtgaacattgtggtgttaaccagatggtttttactggcactgatgcttgtactt

SEQ ID NO: 15094 - DNA, 80 bp, synthetic construct
  misc_feature 1..80: note = Synthetic: >SBB-726-cand-4960-5039
  source 1..80: mol_type = other DNA
gtgatgcagactgtttgtgaacattgtggtgttaaccagatggtttttactggcactgatgcttgtactttttacggctc

SEQ ID NO: 15095 - DNA, 80 bp, synthetic construct
  misc_feature 1..80: note = Synthetic: >SBB-747-cand-5110-5189
  source 1..80: mol_type = other DNA
gtttctgagcagaaatcaccttggttgttaatgtcatgtacaccaacacaggtacctcttgataccaatggcaattggaa

SEQ ID NO: 15096 - DNA, 80 bp, synthetic construct
  misc_feature 1..80: note = Synthetic: >SBB-797-cand-5120-5199
  source 1..80: mol_type = other DNA
agaaatcaccttggttgttaatgtcatgtacaccaacacaggtacctcttgataccaatggcaattggaagactgccatt

SEQ ID NO: 15097 - DNA, 80 bp, synthetic construct
  misc_feature 1..80: note = Synthetic: >SBB-747-cand-1590-1669
  source 1..80: mol_type = other DNA
tccaacagtgcataccgtggagtctctgaaggatttgtgcctggctaacaaaattatgcttggcgataaacccttgccta

SEQ ID NO: 15098 - DNA, 80 bp, synthetic construct
  misc_feature 1..80: note = Synthetic: >SBB-726-cand-1600-1679
  source 1..80: mol_type = other DNA
cataccgtggagtctctgaaggatttgtgcctggctaacaaaattatgctcggcgataaacccttgcctacagatgaatt

SEQ ID NO: 15099 - DNA, 80 bp, synthetic construct
  misc_feature 1..80: note = Synthetic: >SBB-024-cand-11750-11829
  source 1..80: mol_type = other DNA
tacaataatgagtctggtaagacttttatgtatgcctttatagcagacaagccagatctcaagtacgttaaatgggaatt

SEQ ID NO: 15100 - DNA, 80 bp, synthetic construct
  misc_feature 1..80: note = Synthetic: >SBB-130-cand-11760-11839
  source 1..80: mol_type = other DNA
ctggtaagacttttatgtatgcctttatagcagacaagccagatctcaagtatgttaaatgggaatttgatggtggttgt

SEQ ID NO: 15101 - DNA, 80 bp, synthetic construct
  misc_feature 1..80: note = Synthetic: >SBB-120-cand-11760-11839
  source 1..80: mol_type = other DNA
agtctggtaagacttttatgtatgccttcatagcagacaagccagacctcaagtacgttaaatgggaatttgatggtggt

SEQ ID NO: 15102 - DNA, 80 bp, synthetic construct
  misc_feature 1..80: note = Synthetic: >SBB-747-cand-7030-7109
  source 1..80: mol_type = other DNA
aattgtgttttatgtgatacatacacagttgatagtacttttatatctaggcaggtagccttggatttaagtacgcaatt

SEQ ID NO: 15103 - DNA, 80 bp, synthetic construct
  misc_feature 1..80: note = Synthetic: >SBB-788-cand-7040-7119
  source 1..80: mol_type = other DNA
catgtgatacatacacagttgatagtacttttatatctaggcaggtagccttggatttaagtacgcaatttaaaagaccc

SEQ ID NO: 15104 - DNA, 80 bp, synthetic construct
  misc_feature 1..80: note = Synthetic: >SBB-726-cand-7050-7129
  source 1..80: mol_type = other DNA
atacacagttgatagtacttttatatctaggcaggtagccttggatttaagtacgcaatttaaaaggcccataatacaca

SEQ ID NO: 15105 - DNA, 80 bp, synthetic construct
  misc_feature 1..80: note = Synthetic: >SBB-788-cand-16240-16319
  source 1..80: mol_type = other DNA
ttgagaaaggtgactacggtgacgtggttaattatcgttccagtacaacttataaattacaggttggtgactattttgtg

SEQ ID NO: 15106 - DNA, 80 bp, synthetic construct
  misc_feature 1..80: note = Synthetic: >SBB-747-cand-16230-16309
  source 1..80: mol_type = other DNA
gaatatatttttgagaaaggtgactacggtgacgtggttaattatcgttccagtacaacttataaattacaggttggtga

SEQ ID NO: 15107 - DNA, 80 bp, synthetic construct
  misc_feature 1..80: note = Synthetic: >SBB-010-cand-15120-15199
  source 1..80: mol_type = other DNA
gttttgggatgaaagtttctatgctagtatgtatgaaaagtctactattctacaggcggcaggtctgtgtgtcgtttgtg

SEQ ID NO: 15108 - DNA, 80 bp, synthetic construct
  misc_feature 1..80: note = Synthetic: >SBB-120-cand-15120-15199
  source 1..80: mol_type = other DNA
gttctgggatgaaagtttctatgctagtatgtacgagaagtctactattctacaggctgcaggtttatgtgtcgtctgtg

SEQ ID NO: 15109 - DNA, 80 bp, synthetic construct
  misc_feature 1..80: note = Synthetic: >PRD-0038-cand-6160-6239
  source 1..80: mol_type = other DNA
tactaagccagtgtccacttctaatacgtttgaagtgttgaattcagatgacgcacaaggaatggatactcttgcttgtg

SEQ ID NO: 15110 - DNA, 80 bp, synthetic construct
  misc_feature 1..80: note = Synthetic: >SBB-010-cand-11960-12039
  source 1..80: mol_type = other DNA
ggttttattggtgctacagtcagacttcaagcaggtaagcagacagaattggcttctaattcgcccctgcttactatgtg

SEQ ID NO: 15111 - DNA, 80 bp, synthetic construct
  misc_feature 1..80: note = Synthetic: >SBB-053-cand-11950-12029
  source 1..80: mol_type = other DNA
tgctgtgttgggttttattggtgctacagtcagacttcaagtaggtaagcagacagaattggcttctaattcgcccctgc

SEQ ID NO: 15112 - DNA, 80 bp, synthetic construct
  misc_feature 1..80: note = Synthetic: >SBB-747-cand-16630-16709
  source 1..80: mol_type = other DNA
gtagtcgtattgtgccagctaaagcgcgtgttgagtgcttttctaagttcaaagtgaacgatgtaagcgctcaatatgtg

SEQ ID NO: 15113 - DNA, 80 bp, synthetic construct
  misc_feature 1..80: note = Synthetic: >SBB-788-cand-16640-16719
  source 1..80: mol_type = other DNA
tgtgccagctaaagcgcgtgttgagtgctttgctaagttcaaagtgaacgatgtaagcgctcaatatgtgttttctacta

SEQ ID NO: 15114 - DNA, 80 bp, synthetic construct
  misc_feature 1..80: note = Synthetic: >SBB-797-cand-20490-20569
  source 1..80: mol_type = other DNA
tttttcacttatttgacaggttttattaaaagcaagttgtctctgggaggcagcgcggctattaaaataactgagcattc

SEQ ID NO: 15115 - DNA, 80 bp, synthetic construct
  misc_feature 1..80: note = Synthetic: >SBB-053-cand-23830-23909
  source 1..80: mol_type = other DNA
gaatggctttgaaagtgccctaggtatctttagtggcaacattgtcaacaaagacactatcacaggcactgctccagcta

SEQ ID NO: 15116 - DNA, 80 bp, synthetic construct
  misc_feature 1..80: note = Synthetic: >SBB-130-cand-23840-23919
  source 1..80: mol_type = other DNA
gacatgaatggctttgaaagtgccctaggtatctttagtggcaatattgtcaacaaagacactaccacaggcactgcgcc

SEQ ID NO: 15117 - DNA, 80 bp, synthetic construct
  misc_feature 1..80: note = Synthetic: >PDF-2386-cand-5840-5919
  source 1..80: mol_type = other DNA
gagcaacctattgacttagttccaactcaacctttgcctaatgctagctttgacaattttaaaattgtctgctcaaatga

SEQ ID NO: 15118 - DNA, 80 bp, synthetic construct
  misc_feature 1..80: note = Synthetic: >PDF-2386-cand-15200-15279
  source 1..80: mol_type = other DNA
ttcttgcacgcaaacatagtacatgttgtactttgtcacatcgtttctacaggttagcaaatgaatgtgcacaagtcctc

SEQ ID NO: 15119 - DNA, 80 bp, synthetic construct
  misc_feature 1..80: note = Synthetic: >PRD-0038-cand-15190-15269
  source 1..80: mol_type = other DNA
gcttctctcgttcttgcacgcaaacatagtacatgttgtactttgtcacatcgtttctacaggttagcaaatgaatgtgc

SEQ ID NO: 15120 - DNA, 80 bp, synthetic construct
  misc_feature 1..80: note = Synthetic: >SBB-041-cand-14350-14429
  source 1..80: mol_type = other DNA
gagttggcacaagtgttgactgaagttgtgtatacaaatggtggcttttaccttaaaccaggtggtacaacctctggtga

SEQ ID NO: 15121 - DNA, 80 bp, synthetic construct
  misc_feature 1..80: note = Synthetic: >PDF-2386-cand-15760-15839
  source 1..80: mol_type = other DNA
gatgattatgtgtacttgccctacccagatccttctagaattttaggcgcaggctgttttgtcgatgatatcgttaaaac

SEQ ID NO: 15122 - DNA, 80 bp, synthetic construct
  misc_feature 1..80: note = Synthetic: >229E-cand-6400-6479
  source 1..80: mol_type = other DNA
gttatgctaagtcaaactttgtcaaggatgattattgtgatggttcattgggctgcaagatgtgtctttttggttaccag

SEQ ID NO: 15123 - DNA, 80 bp, synthetic construct
  misc_feature 1..80: note = Synthetic: >229E-cand-6480-6559
  source 1..80: mol_type = other DNA
gagttaagtcaatttagccatttagatgttgtgtggaagcatataacagaccctttgtttagtaatatgcaacctttcat

SEQ ID NO: 15124 - DNA, 80 bp, synthetic construct
  misc_feature 1..80: note = Synthetic: >229E-cand-6560-6639
  source 1..80: mol_type = other DNA
tgtcatggttttgttgcttatatttggtgacaattatctgagatgcttcttgctgtattttgttgctcagatgataagca

SEQ ID NO: 15125 - DNA, 80 bp, synthetic construct
  misc_feature 1..80: note = Synthetic: >229E-cand-6640-6719
  source 1..80: mol_type = other DNA
cagttggtgtttttctaggctacaaggaaacaaattggtttttgcactttgttccatttgatgttatttgtgatgaacta

SEQ ID NO: 15126 - DNA, 80 bp, synthetic construct
  misc_feature 1..80: note = Synthetic: >229E-cand-6720-6799
  source 1..80: mol_type = other DNA
cttgtcactgttattgttattaaggttatttcttttgtcagacatgtgctttttggttgtgaaaacccagattgcattgc

SEQ ID NO: 15127 - DNA, 80 bp, synthetic construct
  misc_feature 1..80: note = Synthetic: >229E-cand-6800-6879
  source 1..80: mol_type = other DNA
gtgctctaagagtgctagacttaagagattccctgttaacacaattgttaatggtgtgcaacgttcattttatgttaatg

SEQ ID NO: 15128 - DNA, 80 bp, synthetic construct
  misc_feature 1..80: note = Synthetic: >229E-cand-6880-6959
  source 1..80: mol_type = other DNA
caaatggtggtagtaagttttgtaagaaacatagatttttctgtgttgactgtgactcttatggttatggcaacacgttt

SEQ ID NO: 15129 - DNA, 80 bp, synthetic construct
  misc_feature 1..80: note = Synthetic: >229E-cand-6960-7039
  source 1..80: mol_type = other DNA
ataacacctgaagtttctagagaacttggtaatattaccaaaacaaatgtgcaaccaacaggcccagcttatgtcatggt

SEQ ID NO: 15130 - DNA, 80 bp, synthetic construct
  misc_feature 1..80: note = Synthetic: >229E-cand-7040-7119
  source 1..80: mol_type = other DNA
tgacaaagtggagtttgaaaatggtttctatagattgtattccggtgaaacattttggcgttacaattttgatataactg

SEQ ID NO: 15131 - DNA, 80 bp, synthetic construct
  misc_feature 1..80: note = Synthetic: >229E-cand-7120-7199
  source 1..80: mol_type = other DNA
aaagcaagtattcttgcaaagaggttcttaaaaattgtaatgttttggatgatttcatcgtgtttaacaataatggaacc

SEQ ID NO: 15132 - DNA, 80 bp, synthetic construct
  misc_feature 1..80: note = Synthetic: >229E-cand-7200-7279
  source 1..80: mol_type = other DNA
aatgtaacacaggttaaaaatgctagtgtttatttttcacagttgttgtgcaggcctattaaattagttgacagtgaact

SEQ ID NO: 15133 - DNA, 80 bp, synthetic construct
  misc_feature 1..80: note = Synthetic: >229E-cand-7280-7359
  source 1..80: mol_type = other DNA
tttgtctactttgtcagttgattttaatggtgtcttacataaggcatacattgatgtgctacgtaatagttttggtaaag

SEQ ID NO: 15134 - DNA, 80 bp, synthetic construct
  misc_feature 1..80: note = Synthetic: >229E-cand-7360-7439
  source 1..80: mol_type = other DNA
atcttaatgctaatatgtctttagccgagtgtaagagtgctttaggcttgtctattagtgatcatgaatttactagtgct

SEQ ID NO: 15135 - DNA, 80 bp, synthetic construct
  misc_feature 1..80: note = Synthetic: >229E-cand-7440-7519
  source 1..80: mol_type = other DNA
atttccaacgcacatcgttgtgacgttttgttgtctgatttgtcatttaacaactttgtcagttcgtatgctaaacctga

SEQ ID NO: 15136 - DNA, 80 bp, synthetic construct
  misc_feature 1..80: note = Synthetic: >229E-cand-7520-7599
  source 1..80: mol_type = other DNA
tgaaaaattatcagcttatgacttggcttgttgtatgcgtgcaggtgctaaggttgttaatgccaacgttttgacaaagg

SEQ ID NO: 15137 - DNA, 80 bp, synthetic construct
  misc_feature 1..80: note = Synthetic: >229E-cand-7600-7679
  source 1..80: mol_type = other DNA
atcaaactcctattgtttggcatgcaaaggattttaacagtctttctgctgaaggtcgtaagtatattgttaaaactagt

SEQ ID NO: 15138 - DNA, 80 bp, synthetic construct
  misc_feature 1..80: note = Synthetic: >AvianCoV-cand-2280-2359
  source 1..80: mol_type = other DNA
ggtgtgcacaaaattgttcaagatggcgatgaaatttggtttgacgccattgatagtattgatgttgaagatctgggtgt

SEQ ID NO: 15139 - DNA, 80 bp, synthetic construct
  misc_feature 1..80: note = Synthetic: >AvianCoV-cand-2360-2439
  source 1..80: mol_type = other DNA
tgtccaagaaaaacctatagattttgaggtttgtgaagatgtgacacttccagaaaatcaacctggtcatatggttcaaa

SEQ ID NO: 15140 - DNA, 80 bp, synthetic construct
  misc_feature 1..80: note = Synthetic: >AvianCoV-cand-2440-2519
  source 1..80: mol_type = other DNA
tcgaggatgacggaaagaactatatgttcttccgcttcaaaaaggatgagaacatttattatacaccaatgtcacaactt

SEQ ID NO: 15141 - DNA, 80 bp, synthetic construct
  misc_feature 1..80: note = Synthetic: >AvianCoV-cand-2520-2599
  source 1..80: mol_type = other DNA
ggtgctattaatgtagtttgcaaagcaggtggcaagactgtcacctttggtgaaacaactgtgaaagaaataccaccacc

SEQ ID NO: 15142 - DNA, 80 bp, synthetic construct
  misc_feature 1..80: note = Synthetic: >AvianCoV-cand-2600-2679
  source 1..80: mol_type = other DNA
tgatgttgtgcctattaaggttagcattgagtgttgtggtgaaccatggaatacaatcttcaagaaggcttataaagagc

SEQ ID NO: 15143 - DNA, 80 bp, synthetic construct
  misc_feature 1..80: note = Synthetic: >AvianCoV-cand-2680-2759
  source 1..80: mol_type = other DNA
ccattgaagttgagacagacctcacagtagaacaattgctctctgtgatctatgagaaaatgtgtgaagatctcaaattg

SEQ ID NO: 15144 - DNA, 80 bp, synthetic construct
  misc_feature 1..80: note = Synthetic: >AvianCoV-cand-2760-2839
  source 1..80: mol_type = other DNA
tttccagaggcaccagaacctccaccatttgagaatgtcgcacttgttgataaaaacggtaaagatttggattgcataaa

SEQ ID NO: 15145 - DNA, 80 bp, synthetic construct
  misc_feature 1..80: note = Synthetic: >AvianCoV-cand-2840-2919
  source 1..80: mol_type = other DNA
atcatgccatcttatctaccgtgattatgagagcgatgatgacatcgaggaagaagatgctgaggagtgtgatacagatc

SEQ ID NO: 15146 - DNA, 80 bp, synthetic construct
  misc_feature 1..80: note = Synthetic: >AvianCoV-cand-2920-2999
  source 1..80: mol_type = other DNA
cagctgatgctgaggaatgtgatactgcttcagagtgtgaagaagaagatgaggatactaaggtgctggctcttatacaa

SEQ ID NO: 15147 - DNA, 80 bp, synthetic construct
  misc_feature 1..80: note = Synthetic: >AvianCoV-cand-3000-3079
  source 1..80: mol_type = other DNA
gacccagcaagtaacaagtatcctctacctcttgatgatgattatagcgtctataatggatgtattgttcataaggacgc

SEQ ID NO: 15148 - DNA, 80 bp, synthetic construct
  misc_feature 1..80: note = Synthetic: >AvianCoV-cand-3080-3159
  source 1..80: mol_type = other DNA
tcttgatgttgttaatttaccatctggtgaagaaacttttgttgtcaataactgttttgaaggagctgtgaaaccgcttc

SEQ ID NO: 15149 - DNA, 80 bp, synthetic construct
  misc_feature 1..80: note = Synthetic: >AvianCoV-cand-3160-3239
  source 1..80: mol_type = other DNA
cgcagaaggttgttgatgttctaggagattggggagaggctgttgatgcacaagaacaattgtgtgaacaagagtctgca

SEQ ID NO: 15150 - DNA, 80 bp, synthetic construct
  misc_feature 1..80: note = Synthetic: >AvianCoV-cand-3240-3319
  source 1..80: mol_type = other DNA
ctgaatctgtctaaagaatcagttgagaaacctactggtattggtggttcagcaattgaagaagctgttgttgtagagca

SEQ ID NO: 15151 - DNA, 80 bp, synthetic construct
  misc_feature 1..80: note = Synthetic: >AvianCoV-cand-3320-3399
  source 1..80: mol_type = other DNA
ggaagtagttcctgttgttgaagagtctcaagaagtagttgtttttacacctgctgatttagaagttgttaaagaaacat

SEQ ID NO: 15152 - DNA, 80 bp, synthetic construct
  misc_feature 1..80: note = Synthetic: >AvianCoV-cand-3400-3479
  source 1..80: mol_type = other DNA
cagaggatgttgatgagtttattcttgttgctgatgttcctacagaagaagttgtgcctcaagaaaaagaagagccacaa

SEQ ID NO: 15153 - DNA, 80 bp, synthetic construct
  misc_feature 1..80: note = Synthetic: >AvianCoV-cand-3480-3559
  source 1..80: mol_type = other DNA
gtagaacaggagcctattcaagttgttaaaccacaacgtgagaaaaaggctaaaaagttcaaagtcaggcaaaccacatg

SEQ ID NO: 15154 - DNA, 80 bp, synthetic construct
  misc_feature 1..80: note = Synthetic: >Beluga-cand-2350-2429
  source 1..80: mol_type = other DNA
acgaagttgctagtgcaatggaaaccacatatattaccaatgacatggcggtgtgtaatccagaagccgttgttgatgga

SEQ ID NO: 15155 - DNA, 80 bp, synthetic construct
  misc_feature 1..80: note = Synthetic: >Beluga-cand-2430-2509
  source 1..80: mol_type = other DNA
gatatagtggaaattgaaaatcaattttctagtgttattgaggagggcgagaaaaacgctacctcagctagtgcagatat

SEQ ID NO: 15156 - DNA, 80 bp, synthetic construct
  misc_feature 1..80: note = Synthetic: >Beluga-cand-2510-2589
  source 1..80: mol_type = other DNA
tgtaaaatctgcggtaggtctcgttgacccgcggagcgattccttgactgaccagcagtcgggtgttggtgaccttgtgt

SEQ ID NO: 15157 - DNA, 80 bp, synthetic construct
  misc_feature 1..80: note = Synthetic: >Beluga-cand-2590-2669
  source 1..80: mol_type = other DNA
gtaaacaggttgttagtagtgtggctacggtgcagagcgaagtggtaggcgaaggcagtcccgtacatacgcctgatgct

SEQ ID NO: 15158 - DNA, 80 bp, synthetic construct
  misc_feature 1..80: note = Synthetic: >Beluga-cand-2670-2749
  source 1..80: mol_type = other DNA
gacgcgctcattgcaagctccactgctaaccaaggagtagcgaccaaaggattcgagagtgcttcaaatgatgaagagtc

SEQ ID NO: 15159 - DNA, 80 bp, synthetic construct
  misc_feature 1..80: note = Synthetic: >Beluga-cand-2750-2829
  source 1..80: mol_type = other DNA
tgttagtggggctgagagtgttttaccccttactgattgtgatactagttcatctagtaattctgccaaacctctgcaac

SEQ ID NO: 15160 - DNA, 80 bp, synthetic construct
  misc_feature 1..80: note = Synthetic: >Beluga-cand-2830-2909
  source 1..80: mol_type = other DNA
agcggcaaaagaggctgaaaaagagaaaggctaaaaaatctggtgctgatgctgatactgatccctcgaactattctggt

SEQ ID NO: 15161 - DNA, 80 bp, synthetic construct
  misc_feature 1..80: note = Synthetic: >Beluga-cand-2910-2989
  source 1..80: mol_type = other DNA
ataaagggggttagggatgattgtagagatgaatcagctcaggcttcgtgtaagagtgtatcctctgaggaagtgacaga

SEQ ID NO: 15162 - DNA, 80 bp, synthetic construct
  misc_feature 1..80: note = Synthetic: >Beluga-cand-2990-3069
  source 1..80: mol_type = other DNA
tgttgttaaagaagatgaagattggggaaaagctgttgatgctcaggaatgtaaaaacctggcagggcagactaaaccct

SEQ ID NO: 15163 - DNA, 80 bp, synthetic construct
  misc_feature 1..80: note = Synthetic: >Beluga-cand-3070-3149
  source 1..80: mol_type = other DNA
tcatcttttatggagatttacaggagttgctgaagcaacttggcgggtttggttccataatcattaatgccgctaatgaa

SEQ ID NO: 15164 - DNA, 80 bp, synthetic construct
  misc_feature 1..80: note = Synthetic: >Beluga-cand-3150-3229
  source 1..80: mol_type = other DNA
agattgcagcatggaggtggttttgctaaagctgtagcgagtttggcaggccaactgtttattaagaagtgtgaaggtat

SEQ ID NO: 15165 - DNA, 80 bp, synthetic construct
  misc_feature 1..80: note = Synthetic: >Beluga-cand-3230-3309
  source 1..80: mol_type = other DNA
aattcgcacaaagggacctgtgccaatggatacacgtatggttcagactggtccttataattgtagtatgtatggagtaa

SEQ ID NO: 15166 - DNA, 80 bp, synthetic construct
  misc_feature 1..80: note = Synthetic: >Beluga-cand-3310-3389
  source 1..80: mol_type = other DNA
aggctattagaaatgctgttgcacccagagggaatgaacaggatattgaagctaagctcaatacaacttattaccatgct

SEQ ID NO: 15167 - DNA, 80 bp, synthetic construct
  misc_feature 1..80: note = Synthetic: >Beluga-cand-3390-3469
  source 1..80: mol_type = other DNA
attcaggatattgtgaataagcctgaggttattataacacccttgttaggggcggggatatttaatgtagatcctgagtt

SEQ ID NO: 15168 - DNA, 80 bp, synthetic construct
  misc_feature 1..80: note = Synthetic: >Beluga-cand-3470-3549
  source 1..80: mol_type = other DNA
gagtcttaaagcactccttaggtatgccacaaataatgtggttattattaccaatgagaaaaagcagtttgaaatgctta

SEQ ID NO: 15169 - DNA, 80 bp, synthetic construct
  misc_feature 1..80: note = Synthetic: >Beluga-cand-3550-3629
  source 1..80: mol_type = other DNA
aagctcatggtttaattgaagccactttttcaggcgtgaagacttctgctccaggaacttcggtgaagagcgaaaaggag

SEQ ID NO: 15170 - DNA, 80 bp, synthetic construct
  misc_feature 1..80: note = Synthetic: >BetaSp-cand-22370-22449
  source 1..80: mol_type = other DNA
aaaatggattgcacactgtaccattgcacaattcaactaacatacccccaaaacatcttcctgatggtataaaagaccta

SEQ ID NO: 15171 - DNA, 80 bp, synthetic construct
  misc_feature 1..80: note = Synthetic: >BetaSp-cand-22610-22689
  source 1..80: mol_type = other DNA
cccactgaccatcttggtgctataatgggctattgttgtttggatatgatacgagaagagctaccagaagggagtcttcc

SEQ ID NO: 15172 - DNA, 80 bp, synthetic construct
  misc_feature 1..80: note = Synthetic: >BetaSp-cand-22930-23009
  source 1..80: mol_type = other DNA
gttttgaaaatcctcccaccaacgtggtttctcatattaatgatgattggtttttgtttggtgacagtcgtagtgactgt

SEQ ID NO: 15173 - DNA, 80 bp, synthetic construct
  misc_feature 1..80: note = Synthetic: >BetaSp-cand-23010-23089
  source 1..80: mol_type = other DNA
aaccatatcaataatatcaatcctaaaaattattcttatatggacctagacccctcattgtgtaattcaggaaaaatatc

SEQ ID NO: 15174 - DNA, 80 bp, synthetic construct
  misc_feature 1..80: note = Synthetic: >BetaSp-cand-23090-23169
  source 1..80: mol_type = other DNA
ttctaaggctggtaattccatctttaggagctttcatttcactgatttctacaattatcagggagaagggaatcaaataa

SEQ ID NO: 15175 - DNA, 80 bp, synthetic construct
  misc_feature 1..80: note = Synthetic: >BetaSp-cand-23170-23249
  source 1..80: mol_type = other DNA
tattctatgaaggcgttaatttttcaccgagtcatgcgtttaaatgtaccgcgtccggtgataatggtatttggataagt

SEQ ID NO: 15176 - DNA, 80 bp, synthetic construct
  misc_feature 1..80: note = Synthetic: >BtCoV_008_16-cand-24750-24829
  source 1..80: mol_type = other DNA
cagtgtttttgtttacttctttgcactgtttcatgcctcaactttgaggcgcaattatctactacttttcgctcgtttgg

SEQ ID NO: 15177 - DNA, 80 bp, synthetic construct
  misc_feature 1..80: note = Synthetic: >BtCoV_008_16-cand-24830-24909
  source 1..80: mol_type = other DNA
ctgcacttttattctacgtccccattctcgtagtttgtggtgcgtacatcgatgctgtagtaatcagtactgccattgct

SEQ ID NO: 15178 - DNA, 80 bp, synthetic construct
  misc_feature 1..80: note = Synthetic: >BtCoV_008_16-cand-24910-24989
  source 1..80: mol_type = other DNA
ggtaggctactatttgtcagctattatgcatggcgttatagtacacatctctttatcgtttttaacactaccactcttat

SEQ ID NO: 15179 - DNA, 80 bp, synthetic construct
  misc_feature 1..80: note = Synthetic: >BtCoV_008_16-cand-24990-25069
  source 1..80: mol_type = other DNA
gtttcttgatgggcgtgctacgtattttaacggcaactcatttgttgtactagagggtggtgaccattacattcgttttg

SEQ ID NO: 15180 - DNA, 80 bp, synthetic construct
  misc_feature 1..80: note = Synthetic: >BtCoV_008_16-cand-25070-25149
  source 1..80: mol_type = other DNA
gcagtgactttgtgccatttgtttccagagacactgtttatctagctattcgtggccgaagtgagcacgacatccaactg

SEQ ID NO: 15181 - DNA, 80 bp, synthetic construct
  misc_feature 1..80: note = Synthetic: >BtCoV_008_16-cand-25150-25229
  source 1..80: mol_type = other DNA
cttcgtacagttgagttgtttgatggtaaaaacctctacattttctcacggtgtgagattgtaggtattaccaactcttg

SEQ ID NO: 15182 - DNA, 80 bp, synthetic construct
  misc_feature 1..80: note = Synthetic: >BtCoV_008_16-cand-25230-25309
  source 1..80: mol_type = other DNA
ctttgagcaaattcaactagacgaatatgctacagttagtgaatgataatggcctagttgttaatgtacttctttggctc

SEQ ID NO: 15183 - DNA, 80 bp, synthetic construct
  misc_feature 1..80: note = Synthetic: >BtCoV_008_16-cand-25310-25389
  source 1..80: mol_type = other DNA
tttgtagtcttctttctacttatcattagcattacttgcatccagcttataaacctttgcttcacctgtcaccggctgtg

SEQ ID NO: 15184 - DNA, 80 bp, synthetic construct
  misc_feature 1..80: note = Synthetic: >BtCoV_008_16-cand-25390-25469
  source 1..80: mol_type = other DNA
tagtcatgcagtttataagcctgttggacgcatatatggagtgtataagtcttttatgcgaattcaacctttacccagtg

SEQ ID NO: 15185 - DNA, 80 bp, synthetic construct
  misc_feature 1..80: note = Synthetic: >BtCoV_008_16-cand-25470-25549
  source 1..80: mol_type = other DNA
atattttagacgtataaacgaaatgtctacgtctaatgagactattccactagatgaggtggttacacacctcagaaact

SEQ ID NO: 15186 - DNA, 80 bp, synthetic construct
  misc_feature 1..80: note = Synthetic: >BtCoV_008_16-cand-25550-25629
  source 1..80: mol_type = other DNA
ggaatttctcttggaatgtcgtacttactgtactacttgttgtacttcagtacggacattacaattactccagagtcctc

SEQ ID NO: 15187 - DNA, 80 bp, synthetic construct
  misc_feature 1..80: note = Synthetic: >BtCoV_008_16-cand-25630-25709
  source 1..80: mol_type = other DNA
tatgggcttaaaatgctcatattgtgggtgctctggcccttagttctagcgctgtcactttttgactcctgggctagctt

SEQ ID NO: 15188 - DNA, 80 bp, synthetic construct
  misc_feature 1..80: note = Synthetic: >BtCoV_008_16-cand-25710-25789
  source 1..80: mol_type = other DNA
caatgtcaactggtggtttttcgcattcagcatcctgatggcctgcatcactcttgtgctgtggatcatgtatttcgtca

SEQ ID NO: 15189 - DNA, 80 bp, synthetic construct
  misc_feature 1..80: note = Synthetic: >BtCoV_008_16-cand-25790-25869
  source 1..80: mol_type = other DNA
atagctttagattgtggcgcagaacgcgcaccttttgggcttggaatcctgaaacagattcaattctcactacttctgta

SEQ ID NO: 15190 - DNA, 80 bp, synthetic construct
  misc_feature 1..80: note = Synthetic: >BtCoV_008_16-cand-25850-25929
  source 1..80: mol_type = other DNA
caattctcactacttctgtaatgggcagacaggtatccatccctttgcttggtgcacccactggcgtaactctcacactg

SEQ ID NO: 15191 - DNA, 80 bp, synthetic construct
  misc_feature 1..80: note = Synthetic: >BtCoV_008_16-cand-25930-26009
  source 1..80: mol_type = other DNA
cttagcggcacattgcttgttgaaggctttcaggttgctacaggcgtacaggtaaatatgttgcctgcgtttgtaacagt

SEQ ID NO: 15192 - DNA, 80 bp, synthetic construct
  misc_feature 1..80: note = Synthetic: >Delta-cand-20590-20669
  source 1..80: mol_type = other DNA
tctatctttgttaagataactgaacattcattctcacccgaactctactcacttgcgggttggttcgatgattatcaact

SEQ ID NO: 15193 - DNA, 80 bp, synthetic construct
  misc_feature 1..80: note = Synthetic: >Delta-cand-20670-20749
  source 1..80: mol_type = other DNA
attttgcacagcagtcaatgcctcgtcttcagaagcatttttatgctgttttaattatttggggcttgctaaggaaaaca

SEQ ID NO: 15194 - DNA, 80 bp, synthetic construct
  misc_feature 1..80: note = Synthetic: >Delta-cand-20750-20829
  source 1..80: mol_type = other DNA
ttaatggttttaacttacatgcttcctatattcaatggcgcaatgaaatagcgttgacaccaacctattctcctttagcg

SEQ ID NO: 15195 - DNA, 80 bp, synthetic construct
  misc_feature 1..80: note = Synthetic: >Delta-cand-20910-20989
  source 1..80: mol_type = other DNA
ctatctcgttgcatcaggacgccttcttgtgaggccacccacagaatgcagagagctctattgattatgaccttactttg

SEQ ID NO: 15196 - DNA, 80 bp, synthetic construct
  misc_feature 1..80: note = Synthetic: >Delta-cand-20990-21069
  source 1..80: mol_type = other DNA
tctcgttcgagcaagaccgtcaaagtttgctgatgatctactcgatttgctcaccttcccgggtgcacatcgcttcttac

SEQ ID NO: 15197 - DNA, 80 bp, synthetic construct
  misc_feature 1..80: note = Synthetic: >Delta-cand-21070-21149
  source 1..80: mol_type = other DNA
ataaacccacgaggaattcccagaccctacactctcgcataagcacggaatgccagcagtctctactcgcgggctacaaa

SEQ ID NO: 15198 - DNA, 80 bp, synthetic construct
  misc_feature 1..80: note = Synthetic: >Delta-cand-21150-21229
  source 1..80: mol_type = other DNA
acctaataataattttgatgttggtaccacaattcagcagggcggtttcataccctccacttacgttcttcctagtactg

SEQ ID NO: 15199 - DNA, 80 bp, synthetic construct
  misc_feature 1..80: note = Synthetic: >Delta-cand-21230-21309
  source 1..80: mol_type = other DNA
aagatttgaaatctcctaaacaatgggtgggctaccccactaagaacgttaacctcttctctaagatttaaccacttact

SEQ ID NO: 15200 - DNA, 80 bp, synthetic construct
  misc_feature 1..80: note = Synthetic: >Delta-cand-21310-21389
  source 1..80: mol_type = other DNA
cgccaaaactccactttgcccattaatggcctctgatggtcatcggagttatccaacgtcgcagccactcatgctgaatt

SEQ ID NO: 15201 - DNA, 80 bp, synthetic construct
  misc_feature 1..80: note = Synthetic: >Delta-cand-21390-21469
  source 1..80: mol_type = other DNA
gtgttccaaccttttatcttatgactaaaataactaaccatgccaaagctggaaacatcattggaatttccactctcagc

SEQ ID NO: 15202 - DNA, 80 bp, synthetic construct
  misc_feature 1..80: note = Synthetic: >Delta-cand-21470-21549
  source 1..80: mol_type = other DNA
atgtatctcctacctacaacaacaggtgagatacaaacaataacactttttatagctgcggcggtgccatggttaaattg

SEQ ID NO: 15203 - DNA, 80 bp, synthetic construct
  misc_feature 1..80: note = Synthetic: >Delta-cand-21550-21629
  source 1..80: mol_type = other DNA
tttaagggataaccagacacatgatgagaaccaatcagttcgtatcattttagacctcactgccactgaccacatcctga

SEQ ID NO: 15204 - DNA, 80 bp, synthetic construct
  misc_feature 1..80: note = Synthetic: >Delta-cand-21630-21709
  source 1..80: mol_type = other DNA
caataggacttctgctggctctgcagacagtctgcgcgttgaagtcgttggccaacagtctctggtgaaaattatgtgtt

SEQ ID NO: 15205 - DNA, 80 bp, synthetic construct
  misc_feature 1..80: note = Synthetic: >Delta-cand-21710-21789
  source 1..80: mol_type = other DNA
tgtttgtagtgagcagtttaactacataggacatcaagatgctgacagcacaaaccactgcatatagcagtacacaactc

SEQ ID NO: 15206 - DNA, 80 bp, synthetic construct
  misc_feature 1..80: note = Synthetic: >Delta-cand-21790-21869
  source 1..80: mol_type = other DNA
taccttcttctcactctagggccataaattctgagccataacattgatttaacgcagaaaagcaacccaattattgcttt

SEQ ID NO: 15207 - DNA, 80 bp, synthetic construct
  misc_feature 1..80: note = Synthetic: >HKU1-cand-23750-23829
  source 1..80: mol_type = other DNA
ttatcaagaacgtggcactttttatgcttattatgctgattctggcatgcctactacttttttatttagtttgtatcttg

SEQ ID NO: 15208 - DNA, 80 bp, synthetic construct
  misc_feature 1..80: note = Synthetic: >HKU1-cand-23830-23909
  source 1..80: mol_type = other DNA
gtactcttttatctcattattatgttttgcctttgacttgtaatgctatatcttctaatactgataatgagactttacaa

SEQ ID NO: 15209 - DNA, 80 bp, synthetic construct
  misc_feature 1..80: note = Synthetic: >HKU1-cand-23910-23989
  source 1..80: mol_type = other DNA
tattgggtcacacctttgtctaaacgccaatatcttcttaaatttgacaaccgtggtgttattactaatgctgttgattg

SEQ ID NO: 15210 - DNA, 80 bp, synthetic construct
  misc_feature 1..80: note = Synthetic: >HKU1-cand-23990-24069
  source 1..80: mol_type = other DNA
ttctagtagtttctttagtgagattcaatgtaaaactaaatctttattacctaatactggtgtttatgacttatctggtt

SEQ ID NO: 15211 - DNA, 80 bp, synthetic construct
  misc_feature 1..80: note = Synthetic: >HKU1-cand-24070-24149
  source 1..80: mol_type = other DNA
ttactgttaagcctgttgcaactgtacatcgtcgtattcctgatttacctgattgtgacattgataaatggcttaacaat

SEQ ID NO: 15212 - DNA, 80 bp, synthetic construct
  misc_feature 1..80: note = Synthetic: >HKU1-cand-24150-24229
  source 1..80: mol_type = other DNA
tttaatgtaccctcacctcttaattgggaacgtaaaattttttctaattgcaactttaatttgagtactttgcttcgttt

SEQ ID NO: 15213 - DNA, 80 bp, synthetic construct
  misc_feature 1..80: note = Synthetic: >HKU1-cand-24230-24309
  source 1..80: mol_type = other DNA
agttcatactgattctttttcttgtaataattttgatgaatctaagatatatggtagttgttttaagagtattgttttag

SEQ ID NO: 15214 - DNA, 80 bp, synthetic construct
  misc_feature 1..80: note = Synthetic: >HKU1-cand-24310-24389
  source 1..80: mol_type = other DNA
ataaatttgccatacccaactccagacgatctgatttgcagttgggcagttctggttttctgcaatcttctaattataaa

SEQ ID NO: 15215 - DNA, 80 bp, synthetic construct
  misc_feature 1..80: note = Synthetic: >HKU1-cand-24390-24469
  source 1..80: mol_type = other DNA
attgacactacttctagttcttgtcaattgtattatagtttgcctgcaattaatgttactattaataattataatccttc

SEQ ID NO: 15216 - DNA, 80 bp, synthetic construct
  misc_feature 1..80: note = Synthetic: >HKU1-cand-24470-24549
  source 1..80: mol_type = other DNA
ttcttggaatagaaggtatggttttaataattttaatttgagctctcatagtgttgtttactcacgttattgtttttctg

SEQ ID NO: 15217 - DNA, 80 bp, synthetic construct
  misc_feature 1..80: note = Synthetic: >HKU1-cand-24550-24629
  source 1..80: mol_type = other DNA
ttaataatactttttgtccttgtgctaaaccttcttttgcttcaagttgcaagagtcataaaccaccttctgcttcctgt

SEQ ID NO: 15218 - DNA, 80 bp, synthetic construct
  misc_feature 1..80: note = Synthetic: >HKU1-cand-24630-24709
  source 1..80: mol_type = other DNA
cctattggtactaattatcgttcttgtgagagtactactgtactcgaccacactgactggtgtaggtgttcttgtttacc

SEQ ID NO: 15219 - DNA, 80 bp, synthetic construct
  misc_feature 1..80: note = Synthetic: >HKU1-cand-24690-24769
  source 1..80: mol_type = other DNA
tgtaggtgttcttgtttacctgatcctataactgcttatgaccctaggtcttgttctcaaaaaaagtctctggttggtgt

SEQ ID NO: 15220 - DNA, 80 bp, synthetic construct
  misc_feature 1..80: note = Synthetic: >HKU1-cand-24770-24849
  source 1..80: mol_type = other DNA
tggtgaacattgtgcagggttcggtgttgatgaagaaaagtgtggtgtattggatggatcatataatgtttcttgtcttt

SEQ ID NO: 15221 - DNA, 80 bp, synthetic construct
  misc_feature 1..80: note = Synthetic: >HKU1-cand-24850-24929
  source 1..80: mol_type = other DNA
gtagtactgatgcctttctaggttggtcttatgacacttgcgtcagtaacaaccgttgtaatattttttctaattttatt

SEQ ID NO: 15222 - DNA, 80 bp, synthetic construct
  misc_feature 1..80: note = Synthetic: >HKU1-cand-24930-25009
  source 1..80: mol_type = other DNA
ttaaatggtatcaatagtggtaccacttgttctaatgatttattgcagcctaatactgaagtttttactgatgtttgtgt

SEQ ID NO: 15223 - DNA, 80 bp, synthetic construct
  misc_feature 1..80: note = Synthetic: >HKU15-cand-3920-3999
  source 1..80: mol_type = other DNA
aagccaatctctttgatggtgaggactttgttcaagaaccaaaacccggtcaaatctaccttgaggttactgaagaagtt

SEQ ID NO: 15224 - DNA, 80 bp, synthetic construct
  misc_feature 1..80: note = Synthetic: >HKU15-cand-4000-4079
  source 1..80: mol_type = other DNA
cagaaccaagccaaggaacttgaccttaaccttcagcaatactgcgtctacctgaagacttgccaccataaatgggttgt

SEQ ID NO: 15225 - DNA, 80 bp, synthetic construct
  misc_feature 1..80: note = Synthetic: >HKU15-cand-4080-4159
  source 1..80: mol_type = other DNA
gagtcgtacgaacgggttgatgcatctaaaacaaaaagataacaattgttttgttagtgcaggtgtaaacctgtttcaaa

SEQ ID NO: 15226 - DNA, 80 bp, synthetic construct
  misc_feature 1..80: note = Synthetic: >HKU15-cand-4160-4239
  source 1..80: mol_type = other DNA
acactgcttatcaacttagacctgctattgatgctctctatagggagtatctcaatggtaatccaaatagatttgttgct

SEQ ID NO: 15227 - DNA, 80 bp, synthetic construct
  misc_feature 1..80: note = Synthetic: >HKU15-cand-4240-4319
  source 1..80: mol_type = other DNA
tggatctacgcatccactaaccgtcgtgttggtgagatgggttgtccacagcaagttatttctttgctcgttagtaactc

SEQ ID NO: 15228 - DNA, 80 bp, synthetic construct
  misc_feature 1..80: note = Synthetic: >HKU15-cand-4320-4399
  source 1..80: mol_type = other DNA
tgacgcagcattttcagcaactacagcctgttgtaacacctactttaaccacacaggtgttatttcagtagctcgtgaat

SEQ ID NO: 15229 - DNA, 80 bp, synthetic construct
  misc_feature 1..80: note = Synthetic: >HKU15-cand-4400-4479
  source 1..80: mol_type = other DNA
atgacccaatacaaccaaaggtctactgcatgaagtgtgatgtgtggactccctttacaccccagagtggaaaaggtgca

SEQ ID NO: 15230 - DNA, 80 bp, synthetic construct
  misc_feature 1..80: note = Synthetic: >HKU15-cand-4480-4559
  source 1..80: mol_type = other DNA
gttgcaattggtacttctgcagatgaacctaccggtcctgccattaaatttgccgcagctcactgctggtacactaatgg

SEQ ID NO: 15231 - DNA, 80 bp, synthetic construct
  misc_feature 1..80: note = Synthetic: >HKU15-cand-4560-4639
  source 1..80: mol_type = other DNA
caagaaaacagttaatggctatgacactaaagctaatgttgtagctacctatcataggtttgacgtgcctaagcctcaac

SEQ ID NO: 15232 - DNA, 80 bp, synthetic construct
  misc_feature 1..80: note = Synthetic: >HKU15-cand-4640-4719
  source 1..80: mol_type = other DNA
ttgtcgaggacgtggttgcgctgcctactaaaaatgactttgaagttctcaatgttgaagaactgccgcaggatagtgtg

SEQ ID NO: 15233 - DNA, 80 bp, synthetic construct
  misc_feature 1..80: note = Synthetic: >HKU15-cand-4720-4799
  source 1..80: mol_type = other DNA
ctccatttggacccacctcctgtacaggccttacaacctaaggctaaccaacacattgagattctagaaaacccagatta

SEQ ID NO: 15234 - DNA, 80 bp, synthetic construct
  misc_feature 1..80: note = Synthetic: >HKU15-cand-4960-5039
  source 1..80: mol_type = other DNA
gactcaacaataaggttgtcagtcgatcttacctgtaaatttgttagaacggttctcccatcgtctaacactgtacacaa

SEQ ID NO: 15235 - DNA, 80 bp, synthetic construct
  misc_feature 1..80: note = Synthetic: >HKU15-cand-5040-5119
  source 1..80: mol_type = other DNA
aacttgtcttggtctgtattattcagcccagacactttttgtttctttagcaccattccttatgttaccagctgtagtta

SEQ ID NO: 15236 - DNA, 80 bp, synthetic construct
  misc_feature 1..80: note = Synthetic: >HKU15-cand-5120-5199
  source 1..80: mol_type = other DNA
gtctgcttaattcaggctatacaattggcacatatttgtatgcaaaaactggctggccttgtaattacaatgccacgcaa

SEQ ID NO: 15237 - DNA, 80 bp, synthetic construct
  misc_feature 1..80: note = Synthetic: >HKU2-cand-8100-8179
  source 1..80: mol_type = other DNA
agtgtttatttaattctgcctgtactaacttagaaggacttggtggcacacgcacttattgctataagactggtcttata

SEQ ID NO: 15238 - DNA, 80 bp, synthetic construct
  misc_feature 1..80: note = Synthetic: >HKU2-cand-8180-8259
  source 1..80: mol_type = other DNA
gagggtgctatgacttatggtgatttgcaacatgattcgtattaccgtttgagtggtgataattatgttcgattaccata

SEQ ID NO: 15239 - DNA, 80 bp, synthetic construct
  misc_feature 1..80: note = Synthetic: >HKU2-cand-8260-8339
  source 1..80: mol_type = other DNA
tgttgtcgttcaaggtcttggttttagagctgtgcgtactcaggctactacatactgccgtgttggtgaatgtgtagatt

SEQ ID NO: 15240 - DNA, 80 bp, synthetic construct
  misc_feature 1..80: note = Synthetic: >HKU2-cand-8340-8419
  source 1..80: mol_type = other DNA
caaaagctggtatgtgttttggtgcagacaggtggatggtatattctaatgacataggttctgactttatttgtggttct

SEQ ID NO: 15241 - DNA, 80 bp, synthetic construct
  misc_feature 1..80: note = Synthetic: >HKU2-cand-8420-8499
  source 1..80: mol_type = other DNA
agcttgatggacttgctacgtaatgtacttagcgtgttcaattataacttttccactatgattatgtcaggccaggtcat

SEQ ID NO: 15242 - DNA, 80 bp, synthetic construct
  misc_feature 1..80: note = Synthetic: >HKU2-cand-8500-8579
  source 1..80: mol_type = other DNA
ttttaattgtgtccttgcatgtgttgttgtttttggctgttacttcgtgatgaaatttagacgcgtctttggtgacatgt

SEQ ID NO: 15243 - DNA, 80 bp, synthetic construct
  misc_feature 1..80: note = Synthetic: >HKU2-cand-8580-8659
  source 1..80: mol_type = other DNA
ctcttgctgtttttacagtttgtgctgctgttgttgtcaacaacctttcctactttatttcattgaattatgtgggtatg

SEQ ID NO: 15244 - DNA, 80 bp, synthetic construct
  misc_feature 1..80: note = Synthetic: >HKU2-cand-8660-8739
  source 1..80: mol_type = other DNA
gttgtttactcttttctatactttattagtactagaggacttaagtattgctttatatgggatattagttatgttgttgc

SEQ ID NO: 15245 - DNA, 80 bp, synthetic construct
  misc_feature 1..80: note = Synthetic: >HKU2-cand-8740-8819
  source 1..80: mol_type = other DNA
ctattgcttgttggcgccatggtggttgcttacatggtatatttgtgcagcattaattggtcttatccctaatttgttta

SEQ ID NO: 15246 - DNA, 80 bp, synthetic construct
  misc_feature 1..80: note = Synthetic: >HKU2-cand-8820-8899
  source 1..80: mol_type = other DNA
aacttaaggtctctacaactttgtttgagggtactaaatttgttggcacatttgatgctgcatctgttggtacctttgtt

SEQ ID NO: 15247 - DNA, 80 bp, synthetic construct
  misc_feature 1..80: note = Synthetic: >HKU2-cand-8900-8979
  source 1..80: mol_type = other DNA
attgatgcacgttcttatgagcgtcttatcaatagcactagtatagagaagattaaacagtatgctagtacttttaataa

SEQ ID NO: 15248 - DNA, 80 bp, synthetic construct
  misc_feature 1..80: note = Synthetic: >HKU2-cand-8980-9059
  source 1..80: mol_type = other DNA
gtacaaatattacagtggtagcgctaatgaggctgattataggtgtgcttgttatgctcatcttgccaaagctcttattg

SEQ ID NO: 15249 - DNA, 80 bp, synthetic construct
  misc_feature 1..80: note = Synthetic: >HKU2-cand-9060-9139
  source 1..80: mol_type = other DNA
atttctcaacaactagacaggacacattatacaccccaccaactgttagtattaattctactttgcaggctggtcttaag

SEQ ID NO: 15250 - DNA, 80 bp, synthetic construct
  misc_feature 1..80: note = Synthetic: >HKU2-cand-9140-9219
  source 1..80: mol_type = other DNA
aaaatggcccaaccatctggccttgttgaaccatgtgtagttcgtgtctcatatggtaatacagtactgaatggtgtttg

SEQ ID NO: 15251 - DNA, 80 bp, synthetic construct
  misc_feature 1..80: note = Synthetic: >HKU2-cand-9220-9299
  source 1..80: mol_type = other DNA
gcttgatgacaaggtttattgccctaggcatgttttggctagtgacactacagttactatagattatgatgcagtttacc

SEQ ID NO: 15252 - DNA, 80 bp, synthetic construct
  misc_feature 1..80: note = Synthetic: >HKU31-cand-20740-20819
  source 1..80: mol_type = other DNA
attcctattgatttaacgtttgttgaatttatgttatggtgcaaagaaggccaagttcaaactttttatcctagacttca

SEQ ID NO: 15253 - DNA, 80 bp, synthetic construct
  misc_feature 1..80: note = Synthetic: >HKU31-cand-20820-20899
  source 1..80: mol_type = other DNA
ggcatctaatgattggaaacctggtttagctatgccttctttgttcaaagtacagaatgtaaaccttgaaccttgccaat

SEQ ID NO: 15254 - DNA, 80 bp, synthetic construct
  misc_feature 1..80: note = Synthetic: >HKU31-cand-20900-20979
  source 1..80: mol_type = other DNA
tggttaattatggacagtccatatccatgccaagaggtgttcatatgaatatagcaaaatatatgcaattggcacaatat

SEQ ID NO: 15255 - DNA, 80 bp, synthetic construct
  misc_feature 1..80: note = Synthetic: >HKU31-cand-20980-21059
  source 1..80: mol_type = other DNA
ttaaatacatgtacaattgcagtgcctgctaatatgcgtgttatgcattttggcgcaggctctgataagggtgtttcacc

SEQ ID NO: 15256 - DNA, 80 bp, synthetic construct
  misc_feature 1..80: note = Synthetic: >HKU31-cand-21060-21139
  source 1..80: mol_type = other DNA
tggaacatcagtattacgacagtggttaccgcctgatgctgttctgatagataatgatattaataattttgtatcagatg

SEQ ID NO: 15257 - DNA, 80 bp, synthetic construct
  misc_feature 1..80: note = Synthetic: >HKU31-cand-21140-21219
  source 1..80: mol_type = other DNA
ctgatataacattatttggtgattgtgctaccgtgcgtattggacaacaagtagatcttgttatatccgatatgtatgat

SEQ ID NO: 15258 - DNA, 80 bp, synthetic construct
  misc_feature 1..80: note = Synthetic: >HKU31-cand-21220-21299
  source 1..80: mol_type = other DNA
cctagtactaaaaatgttagagagagtaatgaatcgaaggctttattctttacatatctctgcaattttattaatagaaa

SEQ ID NO: 15259 - DNA, 80 bp, synthetic construct
  misc_feature 1..80: note = Synthetic: >HKU31-cand-21300-21379
  source 1..80: mol_type = other DNA
tctggctcttggtggctctgttgctattaaaataacagaacattcatggagcgcagaattgtatgaattaatgggaaaat

SEQ ID NO: 15260 - DNA, 80 bp, synthetic construct
  misc_feature 1..80: note = Synthetic: >HKU31-cand-21380-21459
  source 1..80: mol_type = other DNA
ttgcatggtggactgtgttctgtactaatgcaaatgcttcctcctctgaaggatttttaattggtgttaattatttaggt

SEQ ID NO: 15261 - DNA, 80 bp, synthetic construct
  misc_feature 1..80: note = Synthetic: >HKU31-cand-21460-21539
  source 1..80: mol_type = other DNA
acctttaaagaagttatagatggtagtgctatgcatgccaactatatattttggagaaattccacacctatgaatttgag

SEQ ID NO: 15262 - DNA, 80 bp, synthetic construct
  misc_feature 1..80: note = Synthetic: >HKU31-cand-21540-21619
  source 1..80: mol_type = other DNA
tacatactcactttttgatttgtctaaattttgtttaaaattaaaaggtactcctattttacaattaaaagagagtcaga

SEQ ID NO: 15263 - DNA, 80 bp, synthetic construct
  misc_feature 1..80: note = Synthetic: >HKU31-cand-21620-21699
  source 1..80: mol_type = other DNA
ttaacgaactcgtggtctctctattgtcacagggtaagttgctcatacgtgacaatgatacgctcagtgtgtctactgat

SEQ ID NO: 15264 - DNA, 80 bp, synthetic construct
  misc_feature 1..80: note = Synthetic: >HKU31-cand-21700-21779
  source 1..80: mol_type = other DNA
gtgcttgttaatgtttataaaagcaaccccaagcgagggaacatgtatagctgttgacatgcaaccatcatattttatca

SEQ ID NO: 15265 - DNA, 80 bp, synthetic construct
  misc_feature 1..80: note = Synthetic: >HKU31-cand-21780-21859
  source 1..80: mol_type = other DNA
aagattggcctatgccaattaatatgagtaaagcagatggtgttttataccctgttggtcgtacttattctaatatcaca

SEQ ID NO: 15266 - DNA, 80 bp, synthetic construct
  misc_feature 1..80: note = Synthetic: >HKU31-cand-21860-21939
  source 1..80: mol_type = other DNA
ataatgcttgaagggttatttccacaccaagcagatcatggtgatatgtatgtttattcacaatctcataaaaagtttaa

SEQ ID NO: 15267 - DNA, 80 bp, synthetic construct
  misc_feature 1..80: note = Synthetic: >HKU31-cand-21940-22019
  source 1..80: mol_type = other DNA
tcaaggggttggcaagcctttcatttctaattactctctcgttactaatgattttggtaatggcatagtaattagaatag

SEQ ID NO: 15268 - DNA, 80 bp, synthetic construct
  misc_feature 1..80: note = Synthetic: >HKU31-cand-27140-27219
  source 1..80: mol_type = other DNA
aacatttgcagtttatctgttcatgttttataattttataatagctactgtattaaccagtagtaataatactacattag

SEQ ID NO: 15269 - DNA, 80 bp, synthetic construct
  misc_feature 1..80: note = Synthetic: >HKU31-cand-27370-27449
  source 1..80: mol_type = other DNA
tggcagtttcacactcacggccttattttattaaaaactttgagcaaacttgtatttgccctaagtgttgttttatacac

SEQ ID NO: 15270 - DNA, 80 bp, synthetic construct
  misc_feature 1..80: note = Synthetic: >HKU31-cand-27530-27609
  source 1..80: mol_type = other DNA
agataatatctcaaccgtatatgcaccacaaactcgtggtgcagtacctttacacataatcgcaccaagcgtgcttactg

SEQ ID NO: 15271 - DNA, 80 bp, synthetic construct
  misc_feature 1..80: note = Synthetic: >HKU31-cand-27610-27689
  source 1..80: mol_type = other DNA
attctttctaagtacgcgttgcgcttctatgggtcccatttgagacttttcctgagtctctttttggacatttggaaaac

SEQ ID NO: 15272 - DNA, 80 bp, synthetic construct
  misc_feature 1..80: note = Synthetic: >HKU31-cand-27770-27849
  source 1..80: mol_type = other DNA
atacttttagtatgtatggcaatccttacggcctgtcgattatgtgtgcagtgcttaacaggttttaataccttgttagt

SEQ ID NO: 15273 - DNA, 80 bp, synthetic construct
  misc_feature 1..80: note = Synthetic: >HKU31-cand-28090-28169
  source 1..80: mol_type = other DNA
tatgtgcttaaaatgtttatgctttggcttttatggccttgttctatagcactggctgtttttagtgcagtttatcccat

SEQ ID NO: 15274 - DNA, 80 bp, synthetic construct
  misc_feature 1..80: note = Synthetic: >HKU31-cand-28170-28249
  source 1..80: mol_type = other DNA
taatttagcttcccagattatatctggtttactagctgctatctctgtatttatgtggcttggctactttctacagagtt

SEQ ID NO: 15275 - DNA, 80 bp, synthetic construct
  misc_feature 1..80: note = Synthetic: >HKU31-cand-28330-28409
  source 1..80: mol_type = other DNA
acaacagttgttagaccgctagtggaagattctactagtgtcacagctgttgttactaatggttatttgaaaatggcagg

SEQ ID NO: 15276 - DNA, 80 bp, synthetic construct
  misc_feature 1..80: note = Synthetic: >HKU4-cand-13550-13629
  source 1..80: mol_type = other DNA
cccaatccaaagatactaattttttaaacgagtccggggttctagtgtaaatgcccgactagaaccctgttcaagtggtc

SEQ ID NO: 15277 - DNA, 80 bp, synthetic construct
  misc_feature 1..80: note = Synthetic: >HKU4-cand-13790-13869
  source 1..80: mol_type = other DNA
gagtaattatgagttagagaagcgctgctatgatcttcttaaagattgtgatgcagtggctattcatgatttcttcatat

SEQ ID NO: 15278 - DNA, 80 bp, synthetic construct
  misc_feature 1..80: note = Synthetic: >HKU4-cand-14190-14269
  source 1..80: mol_type = other DNA
gaccttaatggtaagtggtatgattttggtgattttgttattacccaaccaggtgctggagtagctattgttgatagcta

SEQ ID NO: 15279 - DNA, 80 bp, synthetic construct
  misc_feature 1..80: note = Synthetic: >HKU4-cand-14270-14349
  source 1..80: mol_type = other DNA
ttattcttaccttatgcctgtgctctcaatgaccaattgtttggcagcagagacacataaggattgtgattttaataagc

SEQ ID NO: 15280 - DNA, 80 bp, synthetic construct
  misc_feature 1..80: note = Synthetic: >HKU4-cand-14430-14509
  source 1..80: mol_type = other DNA
gatcaaacataccaccctaattgtgttaattgtagtgatgatcgttgtattttacattgtgctaatttcaatgtactctt

SEQ ID NO: 15281 - DNA, 80 bp, synthetic construct
  misc_feature 1..80: note = Synthetic: >HKU4-cand-14510-14589
  source 1..80: mol_type = other DNA
ttcaatggtactacctaacacatctttcgggcctatcgttcgtaagatttttgttgatggcgtaccgtttatagtatctt

SEQ ID NO: 15282 - DNA, 80 bp, synthetic construct
  misc_feature 1..80: note = Synthetic: >HKU4-cand-14590-14669
  source 1..80: mol_type = other DNA
gtggttatcactacaaggagttagggttagtcatgaatatggattttaacatccataggcataggcttgcacttaaggaa

SEQ ID NO: 15283 - DNA, 80 bp, synthetic construct
  misc_feature 1..80: note = Synthetic: >HKU4-cand-14670-14749
  source 1..80: mol_type = other DNA
ttgatgatgtatgcagcagatcctgctatgcatatagcatctgcatcagccctttgggatttgaggacaccatgttttag

SEQ ID NO: 15284 - DNA, 80 bp, synthetic construct
  misc_feature 1..80: note = Synthetic: >HKU4-cand-14750-14829
  source 1..80: mol_type = other DNA
tgttgcagctcttacaactggtttgacatttcaaaccgttagacctggcaattttaataaagatttttatgactttgtag

SEQ ID NO: 15285 - DNA, 80 bp, synthetic construct
  misc_feature 1..80: note = Synthetic: >Lucheng19-cand-1280-1359
  source 1..80: mol_type = other DNA
ctgctgtgacctgtctggcgtcgaaatctggtgtactacaaaaacattctccgttgatggggtctgcactgtgggcgcac

SEQ ID NO: 15286 - DNA, 80 bp, synthetic construct
  misc_feature 1..80: note = Synthetic: >Lucheng19-cand-1360-1439
  source 1..80: mol_type = other DNA
atctaatcacagcaaatgacccaatctatgcaaccctctttcccaccaactgcatactgggagatgatggtcgaaccaca

SEQ ID NO: 15287 - DNA, 80 bp, synthetic construct
  misc_feature 1..80: note = Synthetic: >Lucheng19-cand-1440-1519
  source 1..80: mol_type = other DNA
gattatgacctgtgctactccatcatggcaaagtgtgccaatgatggtctagcccagcgcattatcagaggagcactgaa

SEQ ID NO: 15288 - DNA, 80 bp, synthetic construct
  misc_feature 1..80: note = Synthetic: >Lucheng19-cand-1520-1599
  source 1..80: mol_type = other DNA
tgcctcagcacaactcttctctaatacagtggacttgtttatggctacaaaaatctggtttatggagcattgcacaccca

SEQ ID NO: 15289 - DNA, 80 bp, synthetic construct
  misc_feature 1..80: note = Synthetic: >Lucheng19-cand-1600-1679
  source 1..80: mol_type = other DNA
tgtttgcttcagcaatgaagtatctatgggatgctataaagaaaatagcctgcaccacgaaggaactaaaaaaattctgg

SEQ ID NO: 15290 - DNA, 80 bp, synthetic construct
  misc_feature 1..80: note = Synthetic: >Lucheng19-cand-1680-1759
  source 1..80: mol_type = other DNA
gatcatctctgtaatgccaagctctatgttgaaaatcacattttacgctttagcatcacaacctccactaaattcaaaaa

SEQ ID NO: 15291 - DNA, 80 bp, synthetic construct
  misc_feature 1..80: note = Synthetic: >Lucheng19-cand-1760-1839
  source 1..80: mol_type = other DNA
catagtgggaaggtttcttgaaatgcttcgaatttcctttaacattctttgcatagaggctagcgaccgctactttcact

SEQ ID NO: 15292 - DNA, 80 bp, synthetic construct
  misc_feature 1..80: note = Synthetic: >Lucheng19-cand-1840-1919
  source 1..80: mol_type = other DNA
gcaaagatgtcacaggcacaaacctcaagcttttcaaaacactacttgtctcttggtacgagactgccataaaaggtgct

SEQ ID NO: 15293 - DNA, 80 bp, synthetic construct
  misc_feature 1..80: note = Synthetic: >Lucheng19-cand-1920-1999
  source 1..80: mol_type = other DNA
aaagaagccggtttaacaactgcaaaatactttaccagcgttactggcaaactacgtaaagttactgtgaagagaaccga

SEQ ID NO: 15294 - DNA, 80 bp, synthetic construct
  misc_feature 1..80: note = Synthetic: >Lucheng19-cand-2000-2079
  source 1..80: mol_type = other DNA
ggctagtagtgacactgtcctagaagaagtagacaacaacataaaacctcctccaactggaatatgtcgtctaatcaacg

SEQ ID NO: 15295 - DNA, 80 bp, synthetic construct
  misc_feature 1..80: note = Synthetic: >Lucheng19-cand-2080-2159
  source 1..80: mol_type = other DNA
actacgcattctactatggtggtggttattacttcccacttacggcatccaatcaaattattgacggcgctgtttttaaa

SEQ ID NO: 15296 - DNA, 80 bp, synthetic construct
  misc_feature 1..80: note = Synthetic: >Lucheng19-cand-2160-2239
  source 1..80: mol_type = other DNA
gcagctggtagtcctctggccacagatgatgaacaacccttcgtagaaaaaccacctaatgtcaaacttgaattcgagtt

SEQ ID NO: 15297 - DNA, 80 bp, synthetic construct
  misc_feature 1..80: note = Synthetic: >Lucheng19-cand-2240-2319
  source 1..80: mol_type = other DNA
tgacaatgacttagttatgtcttttcttaaaaagtcactagggaatacttcgaaaggattccacaattttgatgactttg

SEQ ID NO: 15298 - DNA, 80 bp, synthetic construct
  misc_feature 1..80: note = Synthetic: >Lucheng19-cand-2320-2399
  source 1..80: mol_type = other DNA
aagagtatatgcaacagaaaattgaaaaactccgccaagctgtggcagcagcagagtacgactttgaaataccagagtgc

SEQ ID NO: 15299 - DNA, 80 bp, synthetic construct
  misc_feature 1..80: note = Synthetic: >Lucheng19-cand-2400-2479
  source 1..80: mol_type = other DNA
tacatatatagttgcaatggcacctatgagatggaacacaccatgcgcatatcggagtttgcctttgaggacgacacaat

SEQ ID NO: 15300 - DNA, 80 bp, synthetic construct
  misc_feature 1..80: note = Synthetic: >Lucheng19-cand-2480-2559
  source 1..80: mol_type = other DNA
tatgcaagaactggtaactgtctcagaagaatgtgcttgtgatgatgctgctgaagaatctggtgccaacgctgatgacg

SEQ ID NO: 15301 - DNA, 80 bp, synthetic construct
  misc_feature 1..80: note = Synthetic: >Lucheng19-cand-14080-14159
  source 1..80: mol_type = other DNA
gctgcatcatggcaaaagatgtcattgtcacaaacctagacaaatctgctggctacccacttaataagtttggtaaggct

SEQ ID NO: 15302 - DNA, 80 bp, synthetic construct
  misc_feature 1..80: note = Synthetic: >Lucheng19-cand-14160-14239
  source 1..80: mol_type = other DNA
aggctctattatgaatccatgacatatgaagaacaggatgcactttatgctatgaccaagagaaatgtgttgcccactat

SEQ ID NO: 15303 - DNA, 80 bp, synthetic construct
  misc_feature 1..80: note = Synthetic: >Lucheng19-cand-14320-14399
  source 1..80: mol_type = other DNA
tgaccacgagccaataccatcaaaagtgtctaaagtccattgtcgccacgcgtaatgccactgttgtaataggtacaaca

SEQ ID NO: 15304 - DNA, 80 bp, synthetic construct
  misc_feature 1..80: note = Synthetic: >Lucheng19-cand-14400-14479
  source 1..80: mol_type = other DNA
aagttttacggtggttgggacaatatgcttagaacactcatagatgatgttgagaatccatgtctcatgggttgggacta

SEQ ID NO: 15305 - DNA, 80 bp, synthetic construct
  misc_feature 1..80: note = Synthetic: >Lucheng19-cand-14560-14639
  source 1..80: mol_type = other DNA
gctctaacatggataaattttaccgtctgtcaaatgaattggcacaggttttgacagaagtcgtacactctaatggtggc

SEQ ID NO: 15306 - DNA, 80 bp, synthetic construct
  misc_feature 1..80: note = Synthetic: >Lucheng19-cand-14640-14719
  source 1..80: mol_type = other DNA
ttctattttaaaccaggcggcacaacatcaggtgatgctagtactgcatatgccaactcagttttcaacatttttcaggc

SEQ ID NO: 15307 - DNA, 80 bp, synthetic construct
  misc_feature 1..80: note = Synthetic: >Lucheng19-cand-14720-14799
  source 1..80: mol_type = other DNA
tgtaagtgctaacgtaaataaactgcttgctgttgacagtaacgtttgtagaaacatagctgtcaaggaattacaacgcg

SEQ ID NO: 15308 - DNA, 80 bp, synthetic construct
  misc_feature 1..80: note = Synthetic: >Lucheng19-cand-14800-14879
  source 1..80: mol_type = other DNA
caatttatgataattgctaccgcacgtcctctataagtgaggaatgcgttaacaacttctatcattatttacgtaagcac

SEQ ID NO: 15309 - DNA, 80 bp, synthetic construct
  misc_feature 1..80: note = Synthetic: >Lucheng19-cand-14960-15039
  source 1..80: mol_type = other DNA
aaacgcatttaaggctactctctattaccagaataatgtgttcatgagcacctccaaatgctgggtagaaccagacatta

SEQ ID NO: 15310 - DNA, 80 bp, synthetic construct
  misc_feature 1..80: note = Synthetic: >Lucheng19-cand-15040-15119
  source 1..80: mol_type = other DNA
atgtaggacctcatgaattctgctcacagcacacgttgcaaattatagatggtgaaggtaaatattacttaccatatcca

SEQ ID NO: 15311 - DNA, 80 bp, synthetic construct
  misc_feature 1..80: note = Synthetic: >Lucheng19-cand-15280-15359
  source 1..80: mol_type = other DNA
aatgggtgaaaaagcttagtaatgatttaaacaaaggagttctggatgcctttgcaatcacaatgttagaagacacacaa

SEQ ID NO: 15312 - DNA, 80 bp, synthetic construct
  misc_feature 1..80: note = Synthetic: >Lucheng19-cand-16640-16719
  source 1..80: mol_type = other DNA
agccccacgtaccctaataactaaaggtgcactggaacccgctgattataacgttgtcacacgcctaatgtgcaccatcg

SEQ ID NO: 15313 - DNA, 80 bp, synthetic construct
  misc_feature 1..80: note = Synthetic: >Lucheng19-cand-16810-16889
  source 1..80: mol_type = other DNA
cagtaaaccccccaagtaatttgtgcttcaaattgctatttaaaggagctgttcaccatgacgctggttcttgtgttaat

SEQ ID NO: 15314 - DNA, 80 bp, synthetic construct
  misc_feature 1..80: note = Synthetic: >Lucheng19-cand-16890-16969
  source 1..80: mol_type = other DNA
agaaagcaactcgatattgtaaaacaatttctagctcgcaaccccgactggtctaaggctgtttttatatcaccttacaa

SEQ ID NO: 15315 - DNA, 80 bp, synthetic construct
  misc_feature 1..80: note = Synthetic: >Lucheng19-cand-16970-17049
  source 1..80: mol_type = other DNA
cagtcagaattatgttgctgctagaattctaggcctacaaacccaaactgttgattccgcacagggtagcgaatatgact

SEQ ID NO: 15316 - DNA, 80 bp, synthetic construct
  misc_feature 1..80: note = Synthetic: >Lucheng19-cand-17050-17129
  source 1..80: mol_type = other DNA
acgtaatatatacacagacatctgacactgcccatgcacttaacgttaacaggtttaacgttgccatcacaagagccaag

SEQ ID NO: 15317 - DNA, 80 bp, synthetic construct
  misc_feature 1..80: note = Synthetic: >Lucheng19-cand-17130-17209
  source 1..80: mol_type = other DNA
aaaggaatattttgtgttatgaatgatgctaatttgtttaatgctctagagtttaaggagataactacgaccgacctaca

SEQ ID NO: 15318 - DNA, 80 bp, synthetic construct
  misc_feature 1..80: note = Synthetic: >Lucheng19-cand-17210-17289
  source 1..80: mol_type = other DNA
atcggttctaagtgggctctttaaaaattgcatcagaaaaggacatgaattaccacccaaccacgctagatccttcctcg

SEQ ID NO: 15319 - DNA, 80 bp, synthetic construct
  misc_feature 1..80: note = Synthetic: >Lucheng19-cand-17290-17369
  source 1..80: mol_type = other DNA
atcttaactccaaattcaaagtcaaggaagaactcgccgttcatattggtagtagcgaacccacatatgaacacgtccta

SEQ ID NO: 15320 - DNA, 80 bp, synthetic construct
  misc_feature 1..80: note = Synthetic: >Lucheng19-cand-17370-17449
  source 1..80: mol_type = other DNA
tcatggatgggattcagatttgacgcctgccctaaaggataccataccatgttctgtacaagagacttcgccattcgcaa

SEQ ID NO: 15321 - DNA, 80 bp, synthetic construct
  misc_feature 1..80: note = Synthetic: >Lucheng19-cand-17450-17529
  source 1..80: mol_type = other DNA
tgttagaggctggctaggttttgatgtagaaggtgcccatgtctgtggcgaaaactgtggtactaacgtaccactacagc

SEQ ID NO: 15322 - DNA, 80 bp, synthetic construct
  misc_feature 1..80: note = Synthetic: >Lucheng19-cand-17530-17609
  source 1..80: mol_type = other DNA
tggggtttagcaatggtgtggactttgtagtccaaccggaagcaagttatgcaacacagcatggcatactaattaaaaag

SEQ ID NO: 15323 - DNA, 80 bp, synthetic construct
  misc_feature 1..80: note = Synthetic: >Lucheng19-cand-17610-17689
  source 1..80: mol_type = other DNA
gtaaaagcaagagcaccaccaggtgagcaatttacacatcttgtaccactcttacgtaaaggacaaccgtgggccgtagt

SEQ ID NO: 15324 - DNA, 80 bp, synthetic construct
  misc_feature 1..80: note = Synthetic: >Lucheng19-cand-17690-17769
  source 1..80: mol_type = other DNA
acgcaagcgtatagtgcaaatggtatgtgaccacctgaaggacctatccgacgtagtcgtattcgtcttatgggccggag

SEQ ID NO: 15325 - DNA, 80 bp, synthetic construct
  misc_feature 1..80: note = Synthetic: >Lucheng19-cand-17770-17849
  source 1..80: mol_type = other DNA
gcttggaattgaccacaatgcgttacttcgtaaagataggcccaccacgtaactgccattgcggtcgaatagcacagtgc

SEQ ID NO: 15326 - DNA, 80 bp, synthetic construct
  misc_feature 1..80: note = Synthetic: >Lucheng19-cand-17850-17929
  source 1..80: mol_type = other DNA
tacagcagtaatgcagccgcattctcgtgcctgcgtcacgctgtgggctgtgactatctgtacaacccatatgcgttcga

SEQ ID NO: 15327 - DNA, 80 bp, synthetic construct
  misc_feature 1..80: note = Synthetic: >PEDV-cand-6110-6189
  source 1..80: mol_type = other DNA
agctgttagacactatgaattatgcatcggaaagattcttttcctttggtgattttatgtcacgtaatttaattacagtg

SEQ ID NO: 15328 - DNA, 80 bp, synthetic construct
  misc_feature 1..80: note = Synthetic: >PEDV-cand-6190-6269
  source 1..80: mol_type = other DNA
tttttgtacatccttagtattttgggtctctgttttagggcctttcgtaagagggatgttaaagttctagctggtgtacc

SEQ ID NO: 15329 - DNA, 80 bp, synthetic construct
  misc_feature 1..80: note = Synthetic: >PEDV-cand-6270-6349
  source 1..80: mol_type = other DNA
ccaacgtactggtattatattgcgtaaaagtgtgcgctataatgcaaaggctttgggtgtcttcttcaagctaaaacttt

SEQ ID NO: 15330 - DNA, 80 bp, synthetic construct
  misc_feature 1..80: note = Synthetic: >PEDV-cand-6350-6429
  source 1..80: mol_type = other DNA
attggttcaaagttcttggtaagtttagtttgggtatttatgcattgtatgcattactattcatgacaatacgctttaca

SEQ ID NO: 15331 - DNA, 80 bp, synthetic construct
  misc_feature 1..80: note = Synthetic: >PEDV-cand-6430-6509
  source 1..80: mol_type = other DNA
cctataggtggccctgtttgtgatgatgttgttgctggttatgctaattctagttttgacaagaatgagtattgcaacag

SEQ ID NO: 15332 - DNA, 80 bp, synthetic construct
  misc_feature 1..80: note = Synthetic: >PEDV-cand-6510-6589
  source 1..80: mol_type = other DNA
tgttatttgtaaggtctgtctctatgggtaccaggaactttcggacttctctcacacacaggtagtatggcaacacctta

SEQ ID NO: 15333 - DNA, 80 bp, synthetic construct
  misc_feature 1..80: note = Synthetic: >PEDV-cand-6590-6669
  source 1..80: mol_type = other DNA
gagacccattaattggtaatgtgatgcctttcttttatttggcatttctggcaatttttgggggtgtttatgtaaaggct

SEQ ID NO: 15334 - DNA, 80 bp, synthetic construct
  misc_feature 1..80: note = Synthetic: >PEDV-cand-6670-6749
  source 1..80: mol_type = other DNA
attactctctattttattttccagtatcttaacatacttggtgtgtttttgggcctacaacagtccatttggtttttgca

SEQ ID NO: 15335 - DNA, 80 bp, synthetic construct
  misc_feature 1..80: note = Synthetic: >PEDV-cand-6750-6829
  source 1..80: mol_type = other DNA
gcttgtgccttttgatgtctttggtgacgagatcgtcgtctttttcatcgttacacgcgtattgatgttccttaagcatg

SEQ ID NO: 15336 - DNA, 80 bp, synthetic construct
  misc_feature 1..80: note = Synthetic: >PEDV-cand-6830-6909
  source 1..80: mol_type = other DNA
ttttccttggctgcgataaggcatcttgtgtggcttgctctaagagtgctcgccttaagcgcgttcctgtccagactatt

SEQ ID NO: 15337 - DNA, 80 bp, synthetic construct
  misc_feature 1..80: note = Synthetic: >PEDV-cand-6910-6989
  source 1..80: mol_type = other DNA
tttcagggtactagcaaatccttctacgtacatgccaatggtggttctaagttctgtaagaagcacaatttcttttgttt

SEQ ID NO: 15338 - DNA, 80 bp, synthetic construct
  misc_feature 1..80: note = Synthetic: >PEDV-cand-6990-7069
  source 1..80: mol_type = other DNA
aaattgtgattcttatggtccaggctgcacttttattaatgacgtcattgcaactgaagttggtaatgttgtcaaactta

SEQ ID NO: 15339 - DNA, 80 bp, synthetic construct
  misc_feature 1..80: note = Synthetic: >PEDV-cand-7070-7149
  source 1..80: mol_type = other DNA
atgtgcaaccgacaggtcctgccactattcttattgacaaggttgaattcagtaatggtttttactatctttatagtggt

SEQ ID NO: 15340 - DNA, 80 bp, synthetic construct
  misc_feature 1..80: note = Synthetic: >PEDV-cand-7150-7229
  source 1..80: mol_type = other DNA
gacacattttggaagtacaactttgacataacagataacaaatacacttgcaaagagtcacttaaaaattgtagcataat

SEQ ID NO: 15341 - DNA, 80 bp, synthetic construct
  misc_feature 1..80: note = Synthetic: >PEDV-cand-7230-7309
  source 1..80: mol_type = other DNA
cacagactttattgtttttaacaataatggttccaatgtaaatcaggttaagaatgcatgtgtgtatttttcacagatgc

SEQ ID NO: 15342 - DNA, 80 bp, synthetic construct
  misc_feature 1..80: note = Synthetic: >PEDV-cand-7310-7389
  source 1..80: mol_type = other DNA
tttgtaaacctgttaagttagtggactcagcgttgttggccagtttgtctgttgattttggtgcaagcttacatagtgct

SEQ ID NO: 15343 - DNA, 80 bp, synthetic construct
  misc_feature 1..80: note = Synthetic: >SARSCoV-cand-2380-2459
  source 1..80: mol_type = other DNA
agtcttcatcgctcaaagcaagggactttaccgtcagtgtatacgtggcaaggagcagctgcaactactcatgcctctta

SEQ ID NO: 15344 - DNA, 80 bp, synthetic construct
  misc_feature 1..80: note = Synthetic: >SARSCoV-cand-2460-2539
  source 1..80: mol_type = other DNA
aggcaccaaaagaagtaacctttcttgaaggtgattcacatgacacagtacttacctctgaggaggttgttctcaagaac

SEQ ID NO: 15345 - DNA, 80 bp, synthetic construct
  misc_feature 1..80: note = Synthetic: >SARSCoV-cand-2540-2619
  source 1..80: mol_type = other DNA
ggtgaactcgaagcactcgagacgcccgttgatagcttcacaaatggagctatcgttggcacaccagtctgtgtaaatgg

SEQ ID NO: 15346 - DNA, 80 bp, synthetic construct
  misc_feature 1..80: note = Synthetic: >SARSCoV-cand-2620-2699
  source 1..80: mol_type = other DNA
cctcatgctcttagagattaaggacaaagaacaatactgcgcattgtctcctggtttactggctacaaacaatgtctttc

SEQ ID NO: 15347 - DNA, 80 bp, synthetic construct
  misc_feature 1..80: note = Synthetic: >SARSCoV-cand-2700-2779
  source 1..80: mol_type = other DNA
gcttaaaagggggtgcaccaattaaaggtgtaacctttggagaagatactgtttgggaagttcaaggttacaagaatgtg

SEQ ID NO: 15348 - DNA, 80 bp, synthetic construct
  misc_feature 1..80: note = Synthetic: >SARSCoV-cand-2780-2859
  source 1..80: mol_type = other DNA
agaatcacatttgagcttgatgaacgtgttgacaaagtgcttaatgaaaagtgctctgtctacactgttgaatccggtac

SEQ ID NO: 15349 - DNA, 80 bp, synthetic construct
  misc_feature 1..80: note = Synthetic: >SARSCoV-cand-2860-2939
  source 1..80: mol_type = other DNA
cgaagttactgagtttgcatgtgttgtagcagaggctgttgtgaagactttacaaccagtttctgatctccttaccaaca

SEQ ID NO: 15350 - DNA, 80 bp, synthetic construct
  misc_feature 1..80: note = Synthetic: >SARSCoV-cand-2940-3019
  source 1..80: mol_type = other DNA
tgggtattgatcttgatgagtggagtgtagctacattctacttatttgatgatgctggtgaagaaaacttttcatcacgt

SEQ ID NO: 15351 - DNA, 80 bp, synthetic construct
  misc_feature 1..80: note = Synthetic: >SARSCoV-cand-3020-3099
  source 1..80: mol_type = other DNA
atgtattgttccttttaccctccagatgaggaagaagaggacgatgcagagtgtgaggaagaagaaaaagtccttgatga

SEQ ID NO: 15352 - DNA, 80 bp, synthetic construct
  misc_feature 1..80: note = Synthetic: >SARSCoV-cand-3100-3179
  source 1..80: mol_type = other DNA
aacctgtgaacatgagtacggtacagaggatgattatcaaggtctccctctggaatttggtgcctcagctgaaacagttc

SEQ ID NO: 15353 - DNA, 80 bp, synthetic construct
  misc_feature 1..80: note = Synthetic: >SARSCoV-cand-3180-3259
  source 1..80: mol_type = other DNA
gagttgaagaggaagaagaagaggaagactggctggatgatactactgagcaatcagagattgagccagaaccagaacct

SEQ ID NO: 15354 - DNA, 80 bp, synthetic construct
  misc_feature 1..80: note = Synthetic: >SARSCoV-cand-3260-3339
  source 1..80: mol_type = other DNA
acacctgaagaaccagttaatcagtttactggttatttaaaacttactgacaatgttgccattaaatgtgttgacatcgt

SEQ ID NO: 15355 - DNA, 80 bp, synthetic construct
  misc_feature 1..80: note = Synthetic: >SARSCoV-cand-3340-3419
  source 1..80: mol_type = other DNA
taaggaggcacaaagtgctaatcctatggtgattgtaaatgctgctaacatacacctgaaacatggtggtggtgtagcag

SEQ ID NO: 15356 - DNA, 80 bp, synthetic construct
  misc_feature 1..80: note = Synthetic: >SARSCoV-cand-3420-3499
  source 1..80: mol_type = other DNA
gtgcactcaacaaggcaaccaatggtgccatgcaaaaggagagtgatgattacattaagctaaatggccctcttacagta

SEQ ID NO: 15357 - DNA, 80 bp, synthetic construct
  misc_feature 1..80: note = Synthetic: >SARSCoV-cand-3500-3579
  source 1..80: mol_type = other DNA
ggagggtcttgtttgctttctggacataatcttgctaagaagtgtctgcatgttgttggacctaacctaaatgcaggtga

SEQ ID NO: 15358 - DNA, 80 bp, synthetic construct
  misc_feature 1..80: note = Synthetic: >SARSCoV-cand-3580-3659
  source 1..80: mol_type = other DNA
ggacatccagcttcttaaggcagcatatgaaaatttcaattcacaggacatcttacttgcaccattgttgtcagcaggca

SEQ ID NO: 15359 - DNA, 80 bp, synthetic construct
  misc_feature 1..80: note = Synthetic: >Sparrow-cand-0-79
  source 1..80: mol_type = other DNA
aaaaattatattatataatttttaccttctctagcttcgctagttcgctaccgacaccaatccaggtgcttttgccgtca

SEQ ID NO: 15360 - DNA, 80 bp, synthetic construct
  misc_feature 1..80: note = Synthetic: >Sparrow-cand-110-189
  source 1..80: mol_type = other DNA
gcgtgtgctaaccaggggaccatctggccaccagccactcaggttggaatttccccaagactcctcgcgttggcactagc

SEQ ID NO: 15361 - DNA, 80 bp, synthetic construct
  misc_feature 1..80: note = Synthetic: >Sparrow-cand-190-269
  source 1..80: mol_type = other DNA
tgtcttcggcttttgcactattttcttctcatctgcagttcctctggccgtttaccacctctatagacagcacggattac

SEQ ID NO: 15362 - DNA, 80 bp, synthetic construct
  misc_feature 1..80: note = Synthetic: >Sparrow-cand-510-589
  source 1..80: mol_type = other DNA
tagttgtgaaatggccaagaacaagtccaagcgcgacgctattgcgttgcctgaagtaataccaccaccgctgcagctgt

SEQ ID NO: 15363 - DNA, 80 bp, synthetic construct
  misc_feature 1..80: note = Synthetic: >Sparrow-cand-590-669
  source 1..80: mol_type = other DNA
tcattcatgtggcagcggctgaagagggccatcctaaggttacctctcatcttggaaactataatttgtacaccgctaag

SEQ ID NO: 15364 - DNA, 80 bp, synthetic construct
  misc_feature 1..80: note = Synthetic: >Sparrow-cand-670-749
  source 1..80: mol_type = other DNA
gctccgcctggtgtgcaggttatcaattccaaaacctcacttactgactttgagaatatctttggagctcaacccacctt

SEQ ID NO: 15365 - DNA, 80 bp, synthetic construct
  misc_feature 1..80: note = Synthetic: >Sparrow-cand-750-829
  source 1..80: mol_type = other DNA
gcggtccatccgtaatctggtttgtgaggctcgctcggctgagtggtccacctccaaggatgcttttgcactcaaagcca

SEQ ID NO: 15366 - DNA, 80 bp, synthetic construct
  misc_feature 1..80: note = Synthetic: >Sparrow-cand-830-909
  source 1..80: mol_type = other DNA
aacaacttgactactctgatgccgtcttgagggcaatggttcgcttctgcccctctaaggtatctgcacttgctgccctg

SEQ ID NO: 15367 - DNA, 80 bp, synthetic construct
  misc_feature 1..80: note = Synthetic: >Sparrow-cand-910-989
  source 1..80: mol_type = other DNA
tctctttttaaccggctggttaaaattgaagacaaggaacttgcagcattggctgctgatactgcccttgaattggcgta

SEQ ID NO: 15368 - DNA, 80 bp, synthetic construct
  misc_feature 1..80: note = Synthetic: >Sparrow-cand-990-1069
  source 1..80: mol_type = other DNA
cacggctaaaattggtacaacccttgcggacgcgaaggttgtttcacttacccataaggatgcctatcttaccctcagca

SEQ ID NO: 15369 - DNA, 80 bp, synthetic construct
  misc_feature 1..80: note = Synthetic: >Sparrow-cand-1070-1149
  source 1..80: mol_type = other DNA
atgaggtcttaggcgttccttttactgcaacactcatggcaaaggctaccaccatcaatggagccatgcaatactcaaac

SEQ ID NO: 15370 - DNA, 80 bp, synthetic construct
  misc_feature 1..80: note = Synthetic: >Sparrow-cand-1150-1229
  source 1..80: mol_type = other DNA
ttctacctttaccctcgtgcaactattaaagtcgccgatggtaaggctgaagctatttcaaccaaactcttgccggctac

SEQ ID NO: 15371 - DNA, 80 bp, synthetic construct
  misc_feature 1..80: note = Synthetic: >Sparrow-cand-1230-1309
  source 1..80: mol_type = other DNA
tgtcaaaggtaagcctgctactgaggatgttaacctgctccctgactatcagcagttgcttgtcgatcaagttactggaa

SEQ ID NO: 15372 - DNA, 80 bp, synthetic construct
  misc_feature 1..80: note = Synthetic: >Sparrow-cand-5150-5229
  source 1..80: mol_type = other DNA
gctcaggttacactattggtacatacctatttgcaaaaactgggtggccttgtaattacaacgccactcaacactttgat

SEQ ID NO: 15373 - DNA, 80 bp, synthetic construct
  misc_feature 1..80: note = Synthetic: >Sparrow-cand-5230-5309
  source 1..80: mol_type = other DNA
tacaattcttactgtgctggagacttgatatgtcaagcttgctttgacggtcaagactccctacacttatactcgcatct

SEQ ID NO: 15374 - DNA, 80 bp, synthetic construct
  misc_feature 1..80: note = Synthetic: >Sparrow-cand-5310-5389
  source 1..80: mol_type = other DNA
acgtgttaatcagcagccaattcgtgctaatgattatactgtttatgcgttgtcactaatattactactagctaacatga

SEQ ID NO: 15375 - DNA, 80 bp, synthetic construct
  misc_feature 1..80: note = Synthetic: >Sparrow-cand-5390-5469
  source 1..80: mol_type = other DNA
cacttgtcgtggctacgctattagttacactatttgttaacctttatggaatacaaatacccttctatggcacactgact

SEQ ID NO: 15376 - DNA, 80 bp, synthetic construct
  misc_feature 1..80: note = Synthetic: >Sparrow-cand-5470-5549
  source 1..80: mol_type = other DNA
atagactaccagtctgcactggttttaactttttcagtgtactatttttacaaagttatgaagtttttccgtcacctcac

SEQ ID NO: 15377 - DNA, 80 bp, synthetic construct
  misc_feature 1..80: note = Synthetic: >Sparrow-cand-5550-5629
  source 1..80: mol_type = other DNA
gcatgggtgtaaaacacctacgtgtgctgtgtgcgctaaactcagaactccacctacaataacagttgagactgtcgtac

SEQ ID NO: 15378 - DNA, 80 bp, synthetic construct
  misc_feature 1..80: note = Synthetic: >Sparrow-cand-5710-5789
  source 1..80: mol_type = other DNA
tgcacttcacagaaccccggcacattcataccaactgaagctattgaatccctttcgagggccacaaagcttagtgtaaa

SEQ ID NO: 15379 - DNA, 80 bp, synthetic construct
  misc_feature 1..80: note = Synthetic: >Sparrow-cand-5790-5869
  source 1..80: mol_type = other DNA
accaactgcacctgcattcttacttgctagggatgtagaatgccaaactgatgttgtggttgctcgcgcaacgcataacc

SEQ ID NO: 15380 - DNA, 80 bp, synthetic construct
  misc_feature 1..80: note = Synthetic: >Sparrow-cand-5870-5949
  source 1..80: mol_type = other DNA
aaaacgcacatgtgtgcatttcaaaatactctgatattcgtaccgttgaccaactgcttaagcctactccactgttctca

SEQ ID NO: 15381 - DNA, 80 bp, synthetic construct
  misc_feature 1..80: note = Synthetic: >Sparrow-cand-6030-6109
  source 1..80: mol_type = other DNA
gtcaatggaccttaaacgcactataattatcattgatcaagcctactctaggccaattgataattatcaagaagttgttt

SEQ ID NO: 15382 - DNA, 80 bp, synthetic construct
  misc_feature 1..80: note = Synthetic: >Sparrow-cand-6110-6189
  source 1..80: mol_type = other DNA
ctcgtattgagaaatattacccagttacaaagatcaacccaacaggtgatatctttgcagatattaagcaagccactaac

SEQ ID NO: 15383 - DNA, 80 bp, synthetic construct
  misc_feature 1..80: note = Synthetic: >Sparrow-cand-6190-6269
  source 1..80: mol_type = other DNA
ggacaagcaacagactctgctattaatgcagctgtccttgctgttcagcgtggtcttgattttactgttgataatcccaa

SEQ ID NO: 15384 - DNA, 80 bp, synthetic construct
  misc_feature 1..80: note = Synthetic: >Sparrow-cand-6270-6349
  source 1..80: mol_type = other DNA
caacattctaccacactatgcctttgatttcacaacccttaacgcagaagaccagtctaccattttggagagtggttgtg

SEQ ID NO: 15385 - DNA, 80 bp, synthetic construct
  misc_feature 1..80: note = Synthetic: >Sparrow-cand-25600-25679
  source 1..80: mol_type = other DNA
acgaggattacaccaccaatagctgcttctccattccaggaggatgcttagctttggatacttcatcctcaagttcatct

SEQ ID NO: 15386 - DNA, 80 bp, synthetic construct
  misc_feature 1..80: note = Synthetic: >Sparrow-cand-25680-25759
  source 1..80: mol_type = other DNA
gcctcaccttcttcggagtctttgacccgaaggttgccgaggcagtaggtcctttcatcgaccttgaactagtagggttt

SEQ ID NO: 15387 - DNA, 80 bp, synthetic construct
  misc_feature 1..80: note = Synthetic: >Sparrow-cand-25760-25839
  source 1..80: mol_type = other DNA
caagcatttataacatggattgtcattgtgcgcccgcgtgcagcaaaaatcatgcttaaacaaccaatacttgttcgcaa

SEQ ID NO: 15388 - DNA, 80 bp, synthetic construct
  misc_feature 1..80: note = Synthetic: >Sparrow-cand-26000-26079
  source 1..80: mol_type = other DNA
gcataatctcaacttttgttcgggccacaattttaatcctaattggagaaggccaaaggactgtactacttttgtaggtg

SEQ ID NO: 15389 - DNA, 80 bp, synthetic construct
  misc_feature 1..80: note = Synthetic: >HKU5R-cand-17360-17439
  source 1..80: mol_type = other DNA
atttactacccaacagcgagagttgtttatacagcttgctcacacgcagccgtagatgcattgtgtgagaaagcttttaa

SEQ ID NO: 15390 - DNA, 80 bp, synthetic construct
  misc_feature 1..80: note = Synthetic: >HKU17-cand-15070-15149
  source 1..80: mol_type = other DNA
gctaagtactttcctagtgcacgaatttgctacactgcctcttcgcatgcagcaatcgatgcactctgtgaaaaagcttt

SEQ ID NO: 15391 - DNA, 80 bp, synthetic construct
  misc_feature 1..80: note = Synthetic: >BtSk_AlphaCoV-cand-6270-6349
  source 1..80: mol_type = other DNA
aaaggactggtataatacttaaacgtagtgtgaagtacaattacaaagcactgaaatttttcttcaggctaaaatttcaa

SEQ ID NO: 15392 - DNA, 80 bp, synthetic construct
  misc_feature 1..80: note = Synthetic: >Sb512-cand-6310-6389
  source 1..80: mol_type = other DNA
cctgaaaggactggtataatacttaaacgtagtgtgaagtacaattataaagcactgaaatttttcttcaggctaaaatt

SEQ ID NO: 15393 - DNA, 80 bp, synthetic construct
  misc_feature 1..80: note = Synthetic: >HKU5R-cand-15840-15919
  source 1..80: mol_type = other DNA
acatgcagtttgagctgtatgtaaatgtttacaggaagagccagcctgatcctaaatttgtggacaggtattatgccttt

SEQ ID NO: 15394 - DNA, 80 bp, synthetic construct
  misc_feature 1..80: note = Synthetic: >SEAC-cand-3970-4049
  source 1..80: mol_type = other DNA
gtttacaagattaagcataacaccattgacacaatagttgttaaggacgccgatattaagccttctactgtggcaccttt

SEQ ID NO: 15395 - DNA, 80 bp, synthetic construct
  misc_feature 1..80: note = Synthetic: >HKU2R-cand-3810-3889
  source 1..80: mol_type = other DNA
caagattaagcataacaccattgacacaatagttgttaaggacgctgacattaagccttctactgtggcaccttttattg

SEQ ID NO: 15396 - DNA, 80 bp, synthetic construct
  misc_feature 1..80: note = Synthetic: >WIV16-cand-10710-10789
  source 1..80: mol_type = other DNA
aagatcatgttgacatattgggacctctttctgctcaaacaggaattgccgtcttagatatgtgtgctgctttgaaagag

SEQ ID NO: 15397 - DNA, 80 bp, synthetic construct
  misc_feature 1..80: note = Synthetic: >BtRl_BetaCoV-cand-10680-10759
  source 1..80: mol_type = other DNA
tgttgacatattgggacctctttctgctcaaacaggaattgccgtcttagatatgtgtgctgctttgaaagagctgctgc

SEQ ID NO: 15398 - DNA, 80 bp, synthetic construct
  misc_feature 1..80: note = Synthetic: >MsbCoV1-cand-7130-7209
  source 1..80: mol_type = other DNA
caatatgtcaacacacttggtgtttactttggtatgcaggagaagttttggcctttacagattatcccctttgacatctt

SEQ ID NO: 15399 - DNA, 80 bp, synthetic construct
  misc_feature 1..80: note = Synthetic: >MbCoV1-cand-7130-7209
  source 1..80: mol_type = other DNA
cttctttgctcaatatgtcaacacacttggtgtttactttggtatgcaagagaagttttggcctttacagatcattcctt

SEQ ID NO: 15400 - DNA, 80 bp, synthetic construct
  misc_feature 1..80: note = Synthetic: >HKU5R-cand-20800-20879
  source 1..80: mol_type = other DNA
caagattcctattgacttaactatgattgagtttatgctatggtgtaaggatggccaggtgcaaaccttctacccaagac

SEQ ID NO: 15401 - DNA, 80 bp, synthetic construct
  misc_feature 1..80: note = Synthetic: >HghCoV1-cand-28770-28849
  source 1..80: mol_type = other DNA
cagggtattggcgcagacaagacagaaagcttaatacaggcaatggtgttaaacaattggcccccaggtggtatttctac

SEQ ID NO: 15402 - DNA, 80 bp, synthetic construct
  misc_feature 1..80: note = Synthetic: >MsbCoV1-cand-23820-23899
  source 1..80: mol_type = other DNA
atactattgctgaggctggttgtgtccagtattacaatggcattatggtgttgcctggtgtagttgatccttctttgctt

SEQ ID NO: 15403 - DNA, 80 bp, synthetic construct
  misc_feature 1..80: note = Synthetic: >Sk512R-cand-130-209
  source 1..80: mol_type = other DNA
ttagtagctactacaagtgtcgtgctactccagggttcttggtgtgggttccgtctcacacttcacaccctcaaagtggc

SEQ ID NO: 15404 - DNA, 80 bp, synthetic construct
  misc_feature 1..80: note = Synthetic: >FelineAlpha1-cand-17040-17119
  source 1..80: mol_type = other DNA
actttgctatgcgtaatgtgagagcatggctaggttttgatgttgaaggtgcacatgtctgtggtgataatgttggaact

SEQ ID NO: 15405 - DNA, 80 bp, synthetic construct
  misc_feature 1..80: note = Synthetic: >SEAC-cand-23480-23559
  source 1..80: mol_type = other DNA
acttttcccattgaggaggagtttcgtgagtactttcagaatatgtcatctgagctgcaggtcttgaaaaatttgactgc

SEQ ID NO: 15406 - DNA, 80 bp, synthetic construct
  misc_feature 1..80: note = Synthetic: >HKU17-cand-18810-18889
  source 1..80: mol_type = other DNA
cacctcagatgccaaccaaataatagttacagactacagaacttacatgccaccacaccatgtagacgccatattttctg

SEQ ID NO: 15407 - DNA, 80 bp, synthetic construct
  misc_feature 1..80: note = Synthetic: >BtRl_BetaCoV-cand-17930-18009
  source 1..80: mol_type = other DNA
agaaaatgtaactggactctttaaggactgtagtaagatcattaccggtcttcatccaacacaggcgcctacgcacctca

SEQ ID NO: 15408 - DNA, 80 bp, synthetic construct
  misc_feature 1..80: note = Synthetic: >SARSRC-cand-17950-18029
  source 1..80: mol_type = other DNA
cagaaaatgtaactggactctttaaggactgtagtaaaatcattactggtcttcaccctacacaggcaccgacacacctc

SEQ ID NO: 15409 - DNA, 80 bp, synthetic construct
  misc_feature 1..80: note = Synthetic: >WIV16-cand-11030-11109
  source 1..80: mol_type = other DNA
tttactcttggtattatggcaattgctgcatgtgctatgctgcttgttaagcataagcacgcattcttgtgcttgtttct

SEQ ID NO: 15410 - DNA, 80 bp, synthetic construct
  misc_feature 1..80: note = Synthetic: >BtRl_BetaCoV-cand-11000-11079
  source 1..80: mol_type = other DNA
ttggtattatggcaattgctgcatgtgctatgctgcttgttaagcataagcacgcatttttgtgcttgtttctgttacct

SEQ ID NO: 15411 - DNA, 80 bp, synthetic construct
  misc_feature 1..80: note = Synthetic: >HKU5R-cand-17280-17359
  source 1..80: mol_type = other DNA
agaaagtaggttttagtaaatttgtcactgttcaggggccccctggcaccggcaaaagtcattttgctattgggttagcg

SEQ ID NO: 15412 - DNA, 80 bp, synthetic construct
  misc_feature 1..80: note = Synthetic: >Sb512-cand-6140-6219
  source 1..80: mol_type = other DNA
tggatgctagtaaatttttggacactatgaatgtggcttcagaaaagtttttcacttttggtgattttgtttctagaaac

SEQ ID NO: 15413 - DNA, 80 bp, synthetic construct
  misc_feature 1..80: note = Synthetic: >HKU4R-cand-3880-3959
  source 1..80: mol_type = other DNA
agctggtgctataaataaggcatctggtggtgatgttcaggaagaatcagatgaatatataagtaataatggaccacttc

SEQ ID NO: 15414 - DNA, 80 bp, synthetic construct
  misc_feature 1..80: note = Synthetic: >HKU5R-cand-30330-30409
  source 1..80: mol_type = other DNA
agctgtcattttagtaaagtgtgtagctatagagagaagtttaaagactgtcacctctgcgagattgcaagtgaacagtg

SEQ ID NO: 15415 - DNA, 80 bp, synthetic construct
  misc_feature 1..80: note = Synthetic: >SEAC-cand-15770-15849
  source 1..80: mol_type = other DNA
ctctaagtggcaagttggcgagtttacatttgagaagctcgactatggctctgacactgtgtgttataagtctaatgtca

SEQ ID NO: 15416 - DNA, 80 bp, synthetic construct
  misc_feature 1..80: note = Synthetic: >HghCoV1-cand-26930-27009
  source 1..80: mol_type = other DNA
agcttatactgcacttttagcagttaatgcatgtatttttccactacttctgtcacttaaatgtgacacatgtaggagta

SEQ ID NO: 15417 - DNA, 80 bp, synthetic construct
  misc_feature 1..80: note = Synthetic: >HKU31-cand-27060-27139
  source 1..80: mol_type = other DNA
gcacttttagcagttaatgcatgtatttttccactactactgtcacttaaatgtgacacatgcaggagtagtatgattaa

SEQ ID NO: 15418 - DNA, 80 bp, synthetic construct
  misc_feature 1..80: note = Synthetic: >HKU24-cand-3140-3219
  source 1..80: mol_type = other DNA
gccagtcagacagccaatatggtaatgtcgatggtaatggtgtaggcgacgtgaaagctgtggatgctgtggaaactgaa

SEQ ID NO: 15419 - DNA, 80 bp, synthetic construct
  misc_feature 1..80: note = Synthetic: >WIV16-cand-14510-14589
  source 1..80: mol_type = other DNA
cagcttctggcaatttattgctagataaacgcactacatgcttttcagtagctgcactaacaaacaatgttgcttttcaa

SEQ ID NO: 15420 - DNA, 80 bp, synthetic construct
  misc_feature 1..80: note = Synthetic: >HKU14-cand-22910-22989
  source 1..80: mol_type = other DNA
aggtttataagaatatggctgtgtatcgcagccttacttttgttaatgtaccatatgtttacaatggttctgcacaagct

SEQ ID NO: 15421 - DNA, 80 bp, synthetic construct
  misc_feature 1..80: note = Synthetic: >HKU23-cand-22740-22819
  source 1..80: mol_type = other DNA
cactcaggtttataagaatatggctgtgtatcgcagccttacttttgttaatgtaccatatgtttataatggctctgctc

SEQ ID NO: 15422 - DNA, 80 bp, synthetic construct
  misc_feature 1..80: note = Synthetic: >Sk512R-cand-4610-4689
  source 1..80: mol_type = other DNA
cactgacaaagaacgtcttgctattcaaaactttgtcaccagttttcaaacagaacaacctgttgagccattacctgtta

SEQ ID NO: 15423 - DNA, 80 bp, synthetic construct
  misc_feature 1..80: note = Synthetic: >Sb512-cand-4620-4699
  source 1..80: mol_type = other DNA
tgacaaagaacgtcttgctattcaaaactttgtcaccagttttcaaacagaacaacctgttgagccattacctgttattc

SEQ ID NO: 15424 - DNA, 80 bp, synthetic construct
  misc_feature 1..80: note = Synthetic: >Quail-cand-14040-14119
  source 1..80: mol_type = other DNA
cactgacatgtcgtatataaataatttcctgaatgaggccttctatgctcagatgtatgagcagagtcctacactgcagg

SEQ ID NO: 15425 - DNA, 80 bp, synthetic construct
  misc_feature 1..80: note = Synthetic: >HKU5R-cand-23120-23199
  source 1..80: mol_type = other DNA
gagttcttatctgcaacctggttccgctggagaaattgtgcagtttaattacaaacaagactttagcaatcccacgtgta

SEQ ID NO: 15426 - DNA, 80 bp, synthetic construct
  misc_feature 1..80: note = Synthetic: >HKU8R-cand-17460-17539
  source 1..80: mol_type = other DNA
tgcaggctggagatacttgtggtctttttaaagattgcagtaagttcgatgatccaccattgccaccatctcatgcaccc

SEQ ID NO: 15427 - DNA, 80 bp, synthetic construct
  misc_feature 1..80: note = Synthetic: >HghCoV1-cand-520-599
  source 1..80: mol_type = other DNA
tggaggtacttactccgaaccatttattgttaaccaattggctttttccgatgagcaggatggtcctatgatgggtacta

SEQ ID NO: 15428 - DNA, 80 bp, synthetic construct
  misc_feature 1..80: note = Synthetic: >MbCoV1-cand-5690-5769
  source 1..80: mol_type = other DNA
tgttgatgtcgcagcagaccagactattggtgaacaactcaatgcatgtactactgataatgttattatttcagacagtg

SEQ ID NO: 15429 - DNA, 80 bp, synthetic construct
  misc_feature 1..80: note = Synthetic: >MsbCoV1-cand-5690-5769
  source 1..80: mol_type = other DNA
gcagcagaccagactattggtgaacaactcaatgcatgtactactgataatgttattatttcagacagtgttgtaactga

SEQ ID NO: 15430 - DNA, 80 bp, synthetic construct
  misc_feature 1..80: note = Synthetic: >MbCoV1-cand-15060-15139
  source 1..80: mol_type = other DNA
cgacagcttatgccaattctgtttttaacatcttccaagcagtcagtgctaacattaatcgcattttgggcgttaatagc

SEQ ID NO: 15431 - DNA, 80 bp, synthetic construct
  misc_feature 1..80: note = Synthetic: >BatCoV1A-cand-15230-15309
  source 1..80: mol_type = other DNA
gacggcttatgccaattcagtgtttaatatttttcaagcagtcagtgctaacattaatcgcattttgggcgttaatagca

SEQ ID NO: 15432 - DNA, 80 bp, synthetic construct
  misc_feature 1..80: note = Synthetic: >MbCoV1-cand-25010-25089
  source 1..80: mol_type = other DNA
taaatggccttggtatgtgtggttggctattgctgttacacttatcatattggtcggacctatgctatggtgttgtctcg

SEQ ID NO: 15433 - DNA, 80 bp, synthetic construct
  misc_feature 1..80: note = Synthetic: >MsbCoV1-cand-25000-25079
  source 1..80: mol_type = other DNA
tattaaatggccttggtatgtgtggttggctattgttgttacacttatcatattggtcggacttatgctatggtgttgtc

SEQ ID NO: 15434 - DNA, 80 bp, synthetic construct
  misc_feature 1..80: note = Synthetic: >HKU5R-cand-21280-21359
  source 1..80: mol_type = other DNA
cgatccgtccactaaaattgtaggtgaaacaaatgaagcaaaggcgcttttctttgtgtatctctgcaactttattaaaa

SEQ ID NO: 15435 - DNA, 80 bp, synthetic construct
  misc_feature 1..80: note = Synthetic: >HKU5R-cand-15350-15429
  source 1..80: mol_type = other DNA
ggtgtgtcgatccttagcacaatgactaatcgtcaataccaccagaaaatgcttaagtctatggctgccacgcggggttc

SEQ ID NO: 15436 - DNA, 80 bp, synthetic construct
  misc_feature 1..80: note = Synthetic: >HKU5R-cand-7280-7359
  source 1..80: mol_type = other DNA
tttttgctcaaaccgttcagctctatgtaactggtgtcttattggacaggactcacttactcggtactccgcgttccaga

SEQ ID NO: 15437 - DNA, 80 bp, synthetic construct
  misc_feature 1..80: note = Synthetic: >Quail-cand-15780-15859
  source 1..80: mol_type = other DNA
cgcactcaacatggctcgtttgaatgtggcccttacacgtgcaaagataggcatccttgtagtgttccggcaggcaaacg

SEQ ID NO: 15438 - DNA, 80 bp, synthetic construct
  misc_feature 1..80: note = Synthetic: >WIV16-cand-13230-13309
  source 1..80: mol_type = other DNA
gtaagtacgtccaaatacctaccacttgtgctaatgacccagtgggttttacacttagaaacacagtctgtaccgtctgc

SEQ ID NO: 15439 - DNA, 80 bp, synthetic construct
  misc_feature 1..80: note = Synthetic: >HKU5R-cand-26170-26249
  source 1..80: mol_type = other DNA
tcgctgctcaaccaggtttggcagaaacaggttaattccgctcaagaaggaactttggctcatattcgccctacatacgc

SEQ ID NO: 15440 - DNA, 80 bp, synthetic construct
  misc_feature 1..80: note = Synthetic: >BtSk_AlphaCoV-cand-990-1069
  source 1..80: mol_type = other DNA
cggagtggactgttggtgattggaagggatataattctctttgttgcaacatcaaatgcaaacccattaccatagtcacc

SEQ ID NO: 15441 - DNA, 80 bp, synthetic construct
  misc_feature 1..80: note = Synthetic: >Sb512-cand-1040-1119
  source 1..80: mol_type = other DNA
ggaccgttggtgattggaagggatataattctctttgttgcaacatcaaatgcaaacccattaccatagtcaccccaaaa

SEQ ID NO: 15442 - DNA, 80 bp, synthetic construct
  misc_feature 1..80: note = Synthetic: >HKU10R-cand-12630-12709
  source 1..80: mol_type = other DNA
cggggctctagtgcagctcaactagagccctgtaatggcactgacactgatcattgtgtcagagcatttgacatttataa

SEQ ID NO: 15443 - DNA, 80 bp, synthetic construct
  misc_feature 1..80: note = Synthetic: >BtRl_BetaCoV-cand-29450-29529
  source 1..80: mol_type = other DNA
gtaggtttagttaactttaatctcacatagcaatctttaatcaatgtgtaacattagggaggacttgaaagagccaccac

SEQ ID NO: 15444 - DNA, 80 bp, synthetic construct
  misc_feature 1..80: note = Synthetic: >AlphaMink-cand-15040-15119
  source 1..80: mol_type = other DNA
tgttgtttgtagttcacaaacagtactaaggtgtggtgactgcttgagacgtcctttactttgtactaagtgtgcttacg

SEQ ID NO: 15445 - DNA, 80 bp, synthetic construct
  misc_feature 1..80: note = Synthetic: >Alpha2-cand-15030-15109
  source 1..80: mol_type = other DNA
gttgtttgtagttcacaaacagtactaaggtgtggtgattgcttgcggcgtcctttactttgcactaagtgcgcctatga

SEQ ID NO: 15446 - DNA, 80 bp, synthetic construct
  misc_feature 1..80: note = Synthetic: >HKU5R-cand-2250-2329
  source 1..80: mol_type = other DNA
tacaaagctactgcaaaattcatctctgacatgttcactctaataaaagtagtctctgaacggctttacgtctacacgtc

SEQ ID NO: 15447 - DNA, 80 bp, synthetic construct
  misc_feature 1..80: note = Synthetic: >Sb512-cand-14180-14259
  source 1..80: mol_type = other DNA
tgacttgtatgcttacacaaagcgtaatatcatacctactatgacccagcttaatttgaagtatgccattagtggtaaag

SEQ ID NO: 15448 - DNA, 80 bp, synthetic construct
  misc_feature 1..80: note = Synthetic: >Sk512R-cand-4370-4449
  source 1..80: mol_type = other DNA
taaggttggtagtggtgtgcttattaagtgcaaagaacattccatccttaatgttgtgggaccacgcaaaggtaagcacg

SEQ ID NO: 15449 - DNA, 80 bp, synthetic construct
  misc_feature 1..80: note = Synthetic: >Sb512-cand-4380-4459
  source 1..80: mol_type = other DNA
ggttggtagtggtgtgcttattaagtgcaaagaacattccatccttaatgttgtgggaccacgcaaaggtaagcacgcag

SEQ ID NO: 15450 - DNA, 80 bp, synthetic construct
  misc_feature 1..80: note = Synthetic: >AY692454-cand-2480-2559
  source 1..80: mol_type = other DNA
gagaacatttattatacaccaatgtctcaacttggtgctattaatgtggtttgcaaagcaggcggtaagactgtcacctt

SEQ ID NO: 15451 - DNA, 80 bp, synthetic construct
  misc_feature 1..80: note = Synthetic: >KT253272-cand-0-79
  source 1..80: mol_type = other DNA
aagtgctttatctatctatagatagtaaagatactttctagactttgtgtctactcttctcaactaaacgaaatttttgc

SEQ ID NO: 15452 - DNA, 80 bp, synthetic construct
  misc_feature 1..80: note = Synthetic: >KT253270-cand-0-79
  source 1..80: mol_type = other DNA
aagtgtcttatctatctatagatagaaaagttgcttcttagactttgtgtctactcctctcaactaaacgaaatttttgc

SEQ ID NO: 15453 - DNA, 80 bp, synthetic construct
  misc_feature 1..80: note = Synthetic: >AY692454-cand-14490-14569
  source 1..80: mol_type = other DNA
taagagcttgcagtatgaattgtatcagcaggtctacaggcgagttaattttgacccagcctttgttgaaaagttttatt

SEQ ID NO: 15454 - DNA, 80 bp, synthetic construct
  misc_feature 1..80: note = Synthetic: >KU556804-cand-14480-14559
  source 1..80: mol_type = other DNA
taaagacctgcagtatgaattatatcagcaggtttacaggcgatctaattttgacccagcctttgttgaaaagttttatt

SEQ ID NO: 15455 - DNA, 80 bp, synthetic construct
  misc_feature 1..80: note = Synthetic: >MT114540-cand-23120-23199
  source 1..80: mol_type = other DNA
aatattataatggcatcatggttctacctggtgtggctaatgatgacaagatgactatgtatacagcctctcttgcaggt

SEQ ID NO: 15456 - DNA, 80 bp, synthetic construct
  misc_feature 1..80: note = Synthetic: >MT114541-cand-22960-23039
  source 1..80: mol_type = other DNA
ctaaaagacatacttccgtcccataatagcaggcgtaaatatcgttctgctatagaggacttgctttttgacaaagttgt

SEQ ID NO: 15457 - DNA, 80 bp, synthetic construct
  misc_feature 1..80: note = Synthetic: >MN517816-cand-14090-14169
  source 1..80: mol_type = other DNA
acagtttcatcagaagattcttaagtctatagtcaacactagaaatgtttctgtagttattggaaccaccaagttttatg

SEQ ID NO: 15458 - DNA, 80 bp, synthetic construct
  misc_feature 1..80: note = Synthetic: >MT114543-cand-21640-21719
  source 1..80: mol_type = other DNA
acatcatacactgaagcgttagtacaagttgaaaacacagctattaagaaggtgacttattgtaacagtcacattaataa

SEQ ID NO: 15459 - DNA, 80 bp, synthetic construct
  misc_feature 1..80: note = Synthetic: >MT114542-cand-21580-21659
  source 1..80: mol_type = other DNA
acgtcatacactgaagcgttagtacaagttgaaaacacagctattaagaaggtgacgtattgtaacagtcacattaataa

SEQ ID NO: 15460 - DNA, 80 bp, synthetic construct
  misc_feature 1..80: note = Synthetic: >MT114543-cand-21800-21879
  source 1..80: mol_type = other DNA
agagtgttgtgttactaccaagtttttattcacataccgctgtcaatataactattgaccttggtatgaagcgtagtggt

SEQ ID NO: 15461 - DNA, 80 bp, synthetic construct
  misc_feature 1..80: note = Synthetic: >KT253272-cand-400-479
  source 1..80: mol_type = other DNA
gatttagagcatgccgatttgtttcatttggtttgcaagattgcgtagttggcattgcagacgatgactatgttatgggt

SEQ ID NO: 15462 - DNA, 80 bp, synthetic construct
  misc_feature 1..80: note = Synthetic: >MN531555-cand-12330-12409
  source 1..80: mol_type = other DNA
ctcacttagacaacctaaatctaatgtgcaatcggacgctagtgcgcctggttttgataagaattatttaaacgggtacg

SEQ ID NO: 15463 - DNA, 80 bp, synthetic construct
  misc_feature 1..80: note = Synthetic: >AJ311317-cand-3040-3119
  source 1..80: mol_type = other DNA
cgtctataatggatgtattgtacacaaggacgctcttgatgttgtgaatttaccatctggtgaagaaacttttgttgtca

SEQ ID NO: 15464 - DNA, 80 bp, synthetic construct
  misc_feature 1..80: note = Synthetic: >MN307884-cand-3040-3119
  source 1..80: mol_type = other DNA
tgtctataatggatgtattgttcataaggacgctctagatgttgttaatttaccatctggtgaagaaacttttgttgtca

SEQ ID NO: 15465 - DNA, 80 bp, synthetic construct
  misc_feature 1..80: note = Synthetic: >AJ311317-cand-10650-10729
  source 1..80: mol_type = other DNA
ctacagttcaagctaaattgagtgatgtaaagtgtacaactgttgttttaatgcagcttttgactaagcttaatgttgaa

SEQ ID NO: 15466 - DNA, 80 bp, synthetic construct
  misc_feature 1..80: note = Synthetic: >MN548285-cand-1600-1679
  source 1..80: mol_type = other DNA
gcatgatgtacattgttgtgagcgtgttgtctgtctgtctgatggtgtaacaccggagataaatgatggactcattctag

SEQ ID NO: 15467 - DNA, 80 bp, synthetic construct
  misc_feature 1..80: note = Synthetic: >AY692454-cand-1600-1679
  source 1..80: mol_type = other DNA
gagtgatgttcattgctgtgagcgtgtagtctgtctatctgatggtgtaacaccggagataaatgatggactcattctag

SEQ ID NO: 15468 - DNA, 80 bp, synthetic construct
  misc_feature 1..80: note = Synthetic: >SBB-053-cand-22470-22549
  source 1..80: mol_type = other DNA
acaactggtccaggcttctataaagactattatgactgtaagaaaaatgcaatccaagaccttacatgcgctcagtacca

SEQ ID NO: 15469 - DNA, 80 bp, synthetic construct
  misc_feature 1..80: note = Synthetic: >SBB-122-cand-22480-22559
  source 1..80: mol_type = other DNA
ccggcccaggcttctacaaagactactacgactgtaagaaaaacgcaatccaagaccttacatgcgctcagtaccataac

SEQ ID NO: 15470 - DNA, 80 bp, synthetic construct
  misc_feature 1..80: note = Synthetic: >SBB-130-cand-22480-22559
  source 1..80: mol_type = other DNA
ttgagacaactggccctggcttctataaagactactatgactgcaagaaaaacgcaatccaagaccttacatgcgctcag

SEQ ID NO: 15471 - DNA, 80 bp, synthetic construct
  misc_feature 1..80: note = Synthetic: >SBB-130-cand-4350-4429
  source 1..80: mol_type = other DNA
ttccacttacacctcttgttagtgtgggcatttttaaagtacctatagaggaatcactcagtgcacttatcgcagcagct

SEQ ID NO: 15472 - DNA, 80 bp, synthetic construct
  misc_feature 1..80: note = Synthetic: >SBB-120-cand-4360-4439
  source 1..80: mol_type = other DNA
tacacctcttgttagtgtgggcatttttaaagtacctatagaggaatcactaagtgcacttatcgctgcagctggtgatc

SEQ ID NO: 15473 - DNA, 80 bp, synthetic construct
  misc_feature 1..80: note = Synthetic: >SBB-010-cand-4350-4429
  source 1..80: mol_type = other DNA
gagttccacttacacctcttgttagtgtgggcatttttaaagtacctatagaggaatcaattagtgcacttatcgctgca

SEQ ID NO: 15474 - DNA, 80 bp, synthetic construct
  misc_feature 1..80: note = Synthetic: >SBB-122-cand-4370-4449
  source 1..80: mol_type = other DNA
gttagtgtgggcatttttaaagtacctatagaagaatcattaagtgcacttatcgctgcagctggtgatcgtactgttaa

SEQ ID NO: 15475 - DNA, 80 bp, synthetic construct
  misc_feature 1..80: note = Synthetic: >SBB-041-cand-4360-4439
  source 1..80: mol_type = other DNA
tacacctctggttagtgtgggcatttttaaagtacctatagaggaatctattagtgcacttatcgctgtagctggtgatc

SEQ ID NO: 15476 - DNA, 80 bp, synthetic construct
  misc_feature 1..80: note = Synthetic: >SBB-122-cand-23200-23279
  source 1..80: mol_type = other DNA
tcactgtaaagactactcctggtttgtgtgaaactgatcagattggttctaaatgcatcgtggctaaaaatggcgtcttt

SEQ ID NO: 15477 - DNA, 80 bp, synthetic construct
  misc_feature 1..80: note = Synthetic: >SBB-041-cand-23200-23279
  source 1..80: mol_type = other DNA
taaagactactcctggtttgtgtgaaactgaccaaattggctccaaatgcatcgtggccaaaaacggtgtctttgtttct

SEQ ID NO: 15478 - DNA, 80 bp, synthetic construct
  misc_feature 1..80: note = Synthetic: >SBB-024-cand-5080-5159
  source 1..80: mol_type = other DNA
ggttattgatgcacaagttggtgcttgcagtgtgaataactttgatcttactggtgttaaaccagataatgcactaactg

SEQ ID NO: 15479 - DNA, 80 bp, synthetic construct
  misc_feature 1..80: note = Synthetic: >SBB-053-cand-2840-2919
  source 1..80: mol_type = other DNA
gcacctagtggtgccataacagttatagacaactacgctttctataacagtggtaattattattaccctagtaatggaag

SEQ ID NO: 15480 - DNA, 80 bp, synthetic construct
  misc_feature 1..80: note = Synthetic: >SBB-010-cand-2830-2909
  source 1..80: mol_type = other DNA
tgttaatcctgtacctagtggtgccataacagttatagacaactacgctttctataacagtggtaattattattacccta

SEQ ID NO: 15481 - DNA, 80 bp, synthetic construct
  misc_feature 1..80: note = Synthetic: >SBB-122-cand-2840-2919
  source 1..80: mol_type = other DNA
gtacctaatggtgccataacagttatagacaattatgccttctataacagtggtaattattattaccctagtaatggaag

SEQ ID NO: 15482 - DNA, 80 bp, synthetic construct
  misc_feature 1..80: note = Synthetic: >SBB-120-cand-2830-2909
  source 1..80: mol_type = other DNA
tgttaatcctgcacctaatggtgccataacagttgtagacaattatgccttctataacagtggtaattattattacccta

SEQ ID NO: 15483 - DNA, 80 bp, synthetic construct
  misc_feature 1..80: note = Synthetic: >SBB-010-cand-19840-19919
  source 1..80: mol_type = other DNA
tatgttagtgatgctgattatagtgttactggagattgttccacagtttacttagaagacaagtttgatctcgtcatatc

SEQ ID NO: 15484 - DNA, 80 bp, synthetic construct
  misc_feature 1..80: note = Synthetic: >SBB-130-cand-19840-19919
  source 1..80: mol_type = other DNA
gttagtgatgctgattatagtgttactggagattgttccacagtttacttagaagataagtttgacctcgtcatatctga

SEQ ID NO: 15485 - DNA, 80 bp, synthetic construct
  misc_feature 1..80: note = Synthetic: >SBB-122-cand-19840-19919
  source 1..80: mol_type = other DNA
tatgttagtgatgctgattacagtgttactggagattgttccacggtttacttagaagataagtttgacctcgtcatatc

SEQ ID NO: 15486 - DNA, 80 bp, synthetic construct
  misc_feature 1..80: note = Synthetic: >SBB-041-cand-19830-19909
  source 1..80: mol_type = other DNA
tgttaacgactatgttagtgatgctgattacagtgttactggagattgttccacagtttacttagaagataagtttgacc

SEQ ID NO: 15487 - DNA, 80 bp, synthetic construct
  misc_feature 1..80: note = Synthetic: >SBB-726-cand-7930-8009
  source 1..80: mol_type = other DNA
aaggctgatgtaccctgcgttgtgacaccctttaagatagtaggaggtcataagcgcatagtgcagtggaaacgtgtttt

SEQ ID NO: 15488 - DNA, 80 bp, synthetic construct
  misc_feature 1..80: note = Synthetic: >SBB-797-cand-7920-7999
  source 1..80: mol_type = other DNA
ttctagtttaaaggctgatgtaccctgcgttgtgacaccctttaagatagtaggaggtcataagcgcatagtgcagtgga

SEQ ID NO: 15489 - DNA, 80 bp, synthetic construct
  misc_feature 1..80: note = Synthetic: >SBB-747-cand-7910-7989
  source 1..80: mol_type = other DNA
ttgttactacttctagtttaaaggctgatgtaccctgcgttgtgacaccctttaagatagtaggaggtcataagcgcata

SEQ ID NO: 15490 - DNA, 80 bp, synthetic construct
  misc_feature 1..80: note = Synthetic: >SBB-747-cand-4390-4469
  source 1..80: mol_type = other DNA
ttggaaactaagctatgccaaccagaggccttaattaaggtcttgactacagtggacggtattaattataatactgtttt

SEQ ID NO: 15491 - DNA, 80 bp, synthetic construct
  misc_feature 1..80: note = Synthetic: >SBB-010-cand-22560-22639
  source 1..80: mol_type = other DNA
tatcataatggtatacttgttataccacctattatggatgctgagacacttggcatgtacggtggtattgctgcagcttc

SEQ ID NO: 15492 - DNA, 80 bp, synthetic construct
  misc_feature 1..80: note = Synthetic: >SBB-130-cand-22560-22639
  source 1..80: mol_type = other DNA
taccataatggtatacttgttataccacctattatggatgctgagacacttggcatgtacggtggcattgctgcagcctc

SEQ ID NO: 15493 - DNA, 80 bp, synthetic construct
  misc_feature 1..80: note = Synthetic: >SBB-010-cand-2030-2109
  source 1..80: mol_type = other DNA
aatgaaccagtctttcaggctgttgtcaatcatgaaccagtgattgaatgtaaaactccagaaggttttgttccacctgt

SEQ ID NO: 15494 - DNA, 80 bp, synthetic construct
  misc_feature 1..80: note = Synthetic: >SBB-122-cand-2040-2119
  source 1..80: mol_type = other DNA
tctttcaggctgttgttaatcatgaaccagtgattgaatgtaaaactccagaaggttttgttccacctgtttgtagtact

SEQ ID NO: 15495 - DNA, 80 bp, synthetic construct
  misc_feature 1..80: note = Synthetic: >SBB-053-cand-2040-2119
  source 1..80: mol_type = other DNA
tctttcaggctgttgccaatcatgaaccagtgattgaatgtaaaactccagaaggttttgttccacctgtttgtaatact

SEQ ID NO: 15496 - DNA, 80 bp, synthetic construct
  misc_feature 1..80: note = Synthetic: >SBB-122-cand-12320-12399
  source 1..80: mol_type = other DNA
ttagaaaatgacacatgtaaagtctgtatgtgttggttgaataatggctgtacatgtgatagaacttctatccaagcatt

SEQ ID NO: 15497 - DNA, 80 bp, synthetic construct
  misc_feature 1..80: note = Synthetic: >SBB-130-cand-12310-12389
  source 1..80: mol_type = other DNA
gttctgcttagaaaatgacacatgtaaagtctgtatgtgttggttgaataatggctgtacatgtgatagaacttctatcc

SEQ ID NO: 15498 - DNA, 80 bp, synthetic construct
  misc_feature 1..80: note = Synthetic: >SBB-024-cand-12310-12389
  source 1..80: mol_type = other DNA
acggttctgcttagaaaatgatacatgtaaagtctgtatgtgttggttgaataatggctgtacatgtgatagaacttcta

SEQ ID NO: 15499 - DNA, 80 bp, synthetic construct
  misc_feature 1..80: note = Synthetic: >SBB-726-cand-6730-6809
  source 1..80: mol_type = other DNA
gttgtgctttatttgcctatacctttaggtaatagttggctggtggtctttttgtattatgtcataaggttagttccatt

SEQ ID NO: 15500 - DNA, 80 bp, synthetic construct
  misc_feature 1..80: note = Synthetic: >SBB-797-cand-6720-6799
  source 1..80: mol_type = other DNA
attgcatttagttgtgctttatttgcctatacctttaggtaatagttggctggtggtctttttgtattatgttataaggt

SEQ ID NO: 15501 - DNA, 80 bp, synthetic construct
  misc_feature 1..80: note = Synthetic: >SBB-747-cand-6710-6789
  source 1..80: mol_type = other DNA
ttttggcggtattgcatttagttgtgctttatttgcctatacctttaggtaatagttggctggtggtctttttgtattat

SEQ ID NO: 15502 - DNA, 80 bp, synthetic construct
  misc_feature 1..80: note = Synthetic: >PRD-0038-cand-18470-18549
  source 1..80: mol_type = other DNA
caatgaagtactttgtcaagattggaccagagaggacttgttgtctttgtgacaaacgagccacatgcttttctacttca

SEQ ID NO: 15503 - DNA, 80 bp, synthetic construct
  misc_feature 1..80: note = Synthetic: >PDF-2370-cand-18480-18559
  source 1..80: mol_type = other DNA
ctttgtcaagattggaccagagaggacttgttgtctttgtgacaagcgagccacatgcttttctacttcatcagatacat

SEQ ID NO: 15504 - DNA, 80 bp, synthetic construct
  misc_feature 1..80: note = Synthetic: >SBB-130-cand-7220-7299
  source 1..80: mol_type = other DNA
gtcgacgttctcaaagagagttttggtaaagatctcagtagttgcactactatggctgattgcaaagtggctctggacat

SEQ ID NO: 15505 - DNA, 80 bp, synthetic construct
  misc_feature 1..80: note = Synthetic: >SBB-053-cand-7230-7309
  source 1..80: mol_type = other DNA
ttcttaaagagagttttggtaaagatctcagtagttgcactactatggctgattgcaaagtggctctggacattgatgca

SEQ ID NO: 15506 - DNA, 80 bp, synthetic construct
  misc_feature 1..80: note = Synthetic: >SBB-122-cand-26500-26579
  source 1..80: mol_type = other DNA
tcttcaacaagtcagtgcttatgcaactccctcgcaggcacaatcaattccttctcaattaaatccacaagcatccacat

SEQ ID NO: 15507 - DNA, 80 bp, synthetic construct
  misc_feature 1..80: note = Synthetic: >SBB-120-cand-26530-26609
  source 1..80: mol_type = other DNA
caagtcagtgcttatgcaactccctcgcaggcacaatcaattccttctcaattaaatccacaagcatccacatttcagcc

SEQ ID NO: 15508 - DNA, 80 bp, synthetic construct
  misc_feature 1..80: note = Synthetic: >SBB-024-cand-26510-26589
  source 1..80: mol_type = other DNA
cctttctccaacaagtcagtgcctatgcaactccctcgcaggcacaatcaattccttctcaattaaatccacaagcatcc

SEQ ID NO: 15509 - DNA, 80 bp, synthetic construct
  misc_feature 1..80: note = Synthetic: >SBB-041-cand-14750-14829
  source 1..80: mol_type = other DNA
atgttttcatgagtacttcaaagtgttgggttgaaacagacctttcaaagggaccacatgagttctgttcacaacacacc

SEQ ID NO: 15510 - DNA, 80 bp, synthetic construct
  misc_feature 1..80: note = Synthetic: >SBB-010-cand-14740-14819
  source 1..80: mol_type = other DNA
tatcagaataatgttttcatgagtacttcaaagtgttgggttgaaacagacctttcaaagggaccacatgagttctgttc

SEQ ID NO: 15511 - DNA, 80 bp, synthetic construct
  misc_feature 1..80: note = Synthetic: >PRD-0038-cand-11440-11519
  source 1..80: mol_type = other DNA
attacagtgtgttatgcttgtttactgctttttaggttattgttgttgctgttatttcggcttcttttgtttactcaacc

SEQ ID NO: 15512 - DNA, 80 bp, synthetic construct
  misc_feature 1..80: note = Synthetic: >SBB-788-cand-14480-14559
  source 1..80: mol_type = other DNA
gtatgctataagtgcgaaaaatcgtgctcgcactgtggcaggtgtttctatagcatctactatgacaaatagacaatttc

SEQ ID NO: 15513 - DNA, 80 bp, synthetic construct
  misc_feature 1..80: note = Synthetic: >SBB-788-cand-15280-15359
  source 1..80: mol_type = other DNA
tttgctctcagcatactatgttagtagatatgaagggtgagcaagtttacttgccgtatccagacccttctagaattttg

SEQ ID NO: 15514 - DNA, 80 bp, synthetic construct
  misc_feature 1..80: note = Synthetic: >SBB-747-cand-15270-15349
  source 1..80: mol_type = other DNA
cctcatgaattttgctctcagcatactatgttagtagatatgaagggtgagcaagtttacttgccgtatccagacccttc

SEQ ID NO: 15515 - DNA, 80 bp, synthetic construct
  misc_feature 1..80: note = Synthetic: >SBB-797-cand-19210-19289
  source 1..80: mol_type = other DNA
caaagcgatcagtaaatgtggtcccagaagtcaagttactacgcaaccttggtgttacgtgtacatataacttggtaatc

SEQ ID NO: 15516 - DNA, 80 bp, synthetic construct
  misc_feature 1..80: note = Synthetic: >SBB-726-cand-19220-19299
  source 1..80: mol_type = other DNA
tgtaaatgtggtcccagaagtcaagttattacgcaaccttggtgttacgtgtacatataacttggtaatctgggattatg

SEQ ID NO: 15517 - DNA, 80 bp, synthetic construct
  misc_feature 1..80: note = Synthetic: >SBB-788-cand-19210-19289
  source 1..80: mol_type = other DNA
cgaagcgatcagtaaatgtggtccctgaagtcaagttattgcgtaaccttggtgttacgtgtacatataacttggtaatc

SEQ ID NO: 15518 - DNA, 80 bp, synthetic construct
  misc_feature 1..80: note = Synthetic: >SBB-053-cand-12830-12909
  source 1..80: mol_type = other DNA
gtgatgtcaactattttgataacaagtcttggtatgaccctgtagaaaatgaggacatacacagagtttatgcacatttg

SEQ ID NO: 15519 - DNA, 80 bp, synthetic construct
  misc_feature 1..80: note = Synthetic: >SBB-010-cand-12840-12919
  source 1..80: mol_type = other DNA
ctattttgataacaagtcttggtatgaccctgtagaaaatgaggacatacacagagtttatgcacatttgggtaaaacaa

SEQ ID NO: 15520 - DNA, 80 bp, synthetic construct
  misc_feature 1..80: note = Synthetic: >SBB-041-cand-11470-11549
  source 1..80: mol_type = other DNA
tgttagtgcagacttagagtcatatcttaagatatgtaaggatggttgtgtacattatgctggtgttgtctggaatgttg

SEQ ID NO: 15521 - DNA, 80 bp, synthetic construct
  misc_feature 1..80: note = Synthetic: >SBB-010-cand-11480-11559
  source 1..80: mol_type = other DNA
gacttagagtcatatcttaagatatgtaaggatggttgtgtacattatgctggtgttgtctggaatgttgtagacatacg

SEQ ID NO: 15522 - DNA, 80 bp, synthetic construct
  misc_feature 1..80: note = Synthetic: >SBB-797-cand-24240-24319
  source 1..80: mol_type = other DNA
caaccctgtcaagcttactaatagtaacactcaggttctcactacgtgtagtgttaactatactacagttaattatactg

SEQ ID NO: 15523 - DNA, 80 bp, synthetic construct
  misc_feature 1..80: note = Synthetic: >SBB-726-cand-24240-24319
  source 1..80: mol_type = other DNA
ttataatcctgtcagacttactaatagtaacactcaggtgcttactacgtgtagtgttaactatactacagttaattaca

SEQ ID NO: 15524 - DNA, 80 bp, synthetic construct
  misc_feature 1..80: note = Synthetic: >PRD-0038-cand-15110-15189
  source 1..80: mol_type = other DNA
gtgatgttgagacgcctaaccttatgggttgggattaccctaaatgtgatagagctatgcctaacatgcttaggattatg

SEQ ID NO: 15525 - DNA, 80 bp, synthetic construct
  misc_feature 1..80: note = Synthetic: >PDF-2386-cand-15120-15199
  source 1..80: mol_type = other DNA
gacgcctaaccttatgggttgggattaccctaaatgtgatagagctatgcctaacatgcttaggattatggcttctctcg

SEQ ID NO: 15526 - DNA, 80 bp, synthetic construct
  misc_feature 1..80: note = Synthetic: >SBB-041-cand-12270-12349
  source 1..80: mol_type = other DNA
gcaagtatgtgcaagtgccactgggtaccatagaccccatacggttctgcttagaaaatgacacatgtaaagtctgtatg

SEQ ID NO: 15527 - DNA, 80 bp, synthetic construct
  misc_feature 1..80: note = Synthetic: >SBB-010-cand-12280-12359
  source 1..80: mol_type = other DNA
gcaagtaccattgggtaccatagaccctatacggttctgcttagaaaatgacacatgtaaagtctgtatgtgttggttga

SEQ ID NO: 15528 - DNA, 80 bp, synthetic construct
  misc_feature 1..80: note = Synthetic: >SBB-053-cand-24310-24389
  source 1..80: mol_type = other DNA
cataccttttgtcagtgccaatgaactatacattgccttgcgagggcggaaggaggaagacatccctctgtcacgtagca

SEQ ID NO: 15529 - DNA, 80 bp, synthetic construct
  misc_feature 1..80: note = Synthetic: >SBB-130-cand-24320-24399
  source 1..80: mol_type = other DNA
catgtcataccttttgtcagtgctaatgaattatatattgccttgcgagggcggaaggaggaagacatccctctgtcacg

SEQ ID NO: 15530 - DNA, 80 bp, synthetic construct
  misc_feature 1..80: note = Synthetic: >SBB-747-cand-16710-16789
  source 1..80: mol_type = other DNA
ttttctactattaatgctttgcctgaaactacagcagacattcttgttgtggatgaagttagtatgtgtactaactatga

SEQ ID NO: 15531 - DNA, 80 bp, synthetic construct
  misc_feature 1..80: note = Synthetic: >SBB-797-cand-16720-16799
  source 1..80: mol_type = other DNA
ttaatgctctgcctgaaactacagcagacattcttgttgtggatgaagttagtatgtgtactaactatgatctaagtatg

SEQ ID NO: 15532 - DNA, 80 bp, synthetic construct
  misc_feature 1..80: note = Synthetic: >SBB-797-cand-19610-19689
  source 1..80: mol_type = other DNA
gctgactgattttcagccacgtactcaattagagattgatttcctggatctggatcagtcttgttttcttgataaatatg

SEQ ID NO: 15533 - DNA, 80 bp, synthetic construct
  misc_feature 1..80: note = Synthetic: >SBB-726-cand-19620-19699
  source 1..80: mol_type = other DNA
tttcagccacgtactcaattagagattgatttcctggatctggatcagtcatgttttcttgataaatatgacttacatga

SEQ ID NO: 15534 - DNA, 80 bp, synthetic construct
  misc_feature 1..80: note = Synthetic: >SBB-788-cand-19610-19689
  source 1..80: mol_type = other DNA
gctgaatgattttcagccacgtactcaattagagattgatttcctggatctggaacagtcatgttttcttgataaatatg

SEQ ID NO: 15535 - DNA, 80 bp, synthetic construct
  misc_feature 1..80: note = Synthetic: >PRD-0038-cand-18630-18709
  source 1..80: mol_type = other DNA
gggttttacaggtaaccttcaaagtaaccatgacttgtattgccaggttcatggtaatgctcatgttgctagttgtgatg

SEQ ID NO: 15536 - DNA, 80 bp, synthetic construct
  misc_feature 1..80: note = Synthetic: >PDF-2370-cand-6960-7039
  source 1..80: mol_type = other DNA
gtaatggcaatttaccctgcagtgtttgtcttagtggtttggattcattagacttttatcccgccttagaaacagttcag

SEQ ID NO: 15537 - DNA, 80 bp, synthetic construct
  misc_feature 1..80: note = Synthetic: >SBB-726-cand-20020-20099
  source 1..80: mol_type = other DNA
tagccaccttttacccgcagttgcaatctaagcaagattggaaacctggttttagtatgcctgcactttataaggtgcag

SEQ ID NO: 15538 - DNA, 80 bp, synthetic construct
  misc_feature 1..80: note = Synthetic: >SBB-797-cand-20010-20089
  source 1..80: mol_type = other DNA
gatggcaaggtagccaccttttacccgcagttgcaatctaagcaagattggaaacctggttttagtatgcccgcacttta

SEQ ID NO: 15539 - DNA, 80 bp, synthetic construct
  misc_feature 1..80: note = Synthetic: >SBB-053-cand-26390-26469
  source 1..80: mol_type = other DNA
ctgcattgctctttggtggtgaagtaactaccagagaagttggtgatgaagtggaaatcacttaccattacaaaatgaaa

SEQ ID NO: 15540 - DNA, 80 bp, synthetic construct
  misc_feature 1..80: note = Synthetic: >SBB-010-cand-26400-26479
  source 1..80: mol_type = other DNA
tgcattgctctttggtggtgaagtaactaccagagaagttggtgatgaagtggaaatcacttaccattacaaaatgaaag

SEQ ID NO: 15541 - DNA, 80 bp, synthetic construct
  misc_feature 1..80: note = Synthetic: >SBB-120-cand-22810-22889
  source 1..80: mol_type = other DNA
ctgctttgcaagctattcaagccgttgttaaccaaaatgcagctcaagtcgaagcacttgttaatggcatcagtgaaaac

SEQ ID NO: 15542 - DNA, 80 bp, synthetic construct
  misc_feature 1..80: note = Synthetic: >SBB-041-cand-22800-22879
  source 1..80: mol_type = other DNA
tcttctgcactgcaggctattcaggccgttgtcaaccaaaatgcagctcaagtcgaagcacttgttaatggcatcagtga

SEQ ID NO: 15543 - DNA, 80 bp, synthetic construct
  misc_feature 1..80: note = Synthetic: >SBB-041-cand-7710-7789
  source 1..80: mol_type = other DNA
ttgttgtgtttgcctttttcgccgttagttttattgatttcacaaccactgttactagtgctggtgaatatgactttaag

SEQ ID NO: 15544 - DNA, 80 bp, synthetic construct
  misc_feature 1..80: note = Synthetic: >SBB-130-cand-7700-7779
  source 1..80: mol_type = other DNA
tgtgcatttgttgtgtttgcctttttcgccgttagtttcattgatttcacaaccactgttactagtgctggtgaatatga

SEQ ID NO: 15545 - DNA, 80 bp, synthetic construct
  misc_feature 1..80: note = Synthetic: >229E-cand-23050-23129
  source 1..80: mol_type = other DNA
atgcctttacaggagtcaatgatgctattactcaaacttcacaagctatacaaacagttgccactgcacttaacaagatt

SEQ ID NO: 15546 - DNA, 80 bp, synthetic construct
  misc_feature 1..80: note = Synthetic: >229E-cand-23130-23209
  source 1..80: mol_type = other DNA
caggatgttgtgaatcaacaaggcaatgcattgaaccatctaacttctcagttgaggcaaaattttcaagctatttccag

SEQ ID NO: 15547 - DNA, 80 bp, synthetic construct
  misc_feature 1..80: note = Synthetic: >229E-cand-23210-23289
  source 1..80: mol_type = other DNA
ttctattcaggctatctatgacagacttgacactattcaggctgatcaacaagtagataggcttattactggtagactgg

SEQ ID NO: 15548 - DNA, 80 bp, synthetic construct
  misc_feature 1..80: note = Synthetic: >229E-cand-23290-23369
  source 1..80: mol_type = other DNA
ctgctttgaacgcatttgttgctcagacacttactaagtatactgaggtgcgtgcttctagacagcttgcacaacaaaaa

SEQ ID NO: 15549 - DNA, 80 bp, synthetic construct
  misc_feature 1..80: note = Synthetic: >229E-cand-23370-23449
  source 1..80: mol_type = other DNA
gtgaatgaatgtgtcaaatcccagtctaaccgttatggtttctgtggaaatggcacacacattttctcaattgtgaattc

SEQ ID NO: 15550 - DNA, 80 bp, synthetic construct
  misc_feature 1..80: note = Synthetic: >229E-cand-23450-23529
  source 1..80: mol_type = other DNA
tgctcctgaaggccttgtttttcttcacactgtcttgttgcccacgcaatataaggatgttgaagcgtggtccgggcttt

SEQ ID NO: 15551 - DNA, 80 bp, synthetic construct
  misc_feature 1..80: note = Synthetic: >229E-cand-23530-23609
  source 1..80: mol_type = other DNA
gcgttgataatacaaacggttatgtgctgcgacaacctaatcttgctctttacaaagaaggcaattattatagaatcaca

SEQ ID NO: 15552 - DNA, 80 bp, synthetic construct
  misc_feature 1..80: note = Synthetic: >229E-cand-23610-23689
  source 1..80: mol_type = other DNA
tcacgttttatgtttgaaccacgcatccctactatggcagattttgtccagattgaaaattgcaatgtcacatttgttaa

SEQ ID NO: 15553 - DNA, 80 bp, synthetic construct
  misc_feature 1..80: note = Synthetic: >229E-cand-23690-23769
  source 1..80: mol_type = other DNA
catttctcgctctgagttgcaaactattgtgccagagtatattgatgttaacaagacgctgcaagaattaattgacaaat

SEQ ID NO: 15554 - DNA, 80 bp, synthetic construct
  misc_feature 1..80: note = Synthetic: >229E-cand-23770-23849
  source 1..80: mol_type = other DNA
tgccaaattatactgtcccagacctaggcatcgaccagtacaaccagactattttgaatttgaccagtgaaattagcacc

SEQ ID NO: 15555 - DNA, 80 bp, synthetic construct
  misc_feature 1..80: note = Synthetic: >229E-cand-23850-23929
  source 1..80: mol_type = other DNA
cttgaaaataaatctgcggagcttaattacactgttcaaagactgcaaactcttattgacaacataaatagcactttagt

SEQ ID NO: 15556 - DNA, 80 bp, synthetic construct
  misc_feature 1..80: note = Synthetic: >229E-cand-23930-24009
  source 1..80: mol_type = other DNA
cgacttaaagtggctcaaccgggttgagacttatctcaagtggccgtggtgggtgtggttgtgcatttcagtcgtgctca

SEQ ID NO: 15557 - DNA, 80 bp, synthetic construct
  misc_feature 1..80: note = Synthetic: >229E-cand-24010-24089
  source 1..80: mol_type = other DNA
tctttgtggtgagtattttgctattatgttgttgctctactggttgctgtggcttctttagttgtcttgcatcttctact

SEQ ID NO: 15558 - DNA, 80 bp, synthetic construct
  misc_feature 1..80: note = Synthetic: >229E-cand-24090-24169
  source 1..80: mol_type = other DNA
agaggttgttgtgagtcaactaaacttccttattacgacgttgaaaagattcacatacagtaatggctctaggtttgttt

SEQ ID NO: 15559 - DNA, 80 bp, synthetic construct
  misc_feature 1..80: note = Synthetic: >229E-cand-24170-24249
  source 1..80: mol_type = other DNA
actctgcaaatcgagtctgctgttaatcaatcgctaagcaagtcgaaagttagtgccgtagtttcgcgccaggttatcca

SEQ ID NO: 15560 - DNA, 80 bp, synthetic construct
  misc_feature 1..80: note = Synthetic: >229E-cand-24250-24329
  source 1..80: mol_type = other DNA
ggatgttagagctgccgctgtcactttcaacttgctagcttatacactaatgagcctctttgttgtttactttgcttttt

SEQ ID NO: 15561 - DNA, 80 bp, synthetic construct
  misc_feature 1..80: note = Synthetic: >Anlong-cand-27780-27859
  source 1..80: mol_type = other DNA
ctttagccctggttttcttgattggtggtatgataatgtgcagatcattcatgataacatcttacgctggctacttagtg

SEQ ID NO: 15562 - DNA, 80 bp, synthetic construct
  misc_feature 1..80: note = Synthetic: >Anlong-cand-27860-27939
  source 1..80: mol_type = other DNA
atatgcggcccctagacttccttaaatggatactagtacttttgggcctggtcttatacacaacggtagtgccagtggta

SEQ ID NO: 15563 - DNA, 80 bp, synthetic construct
  misc_feature 1..80: note = Synthetic: >Anlong-cand-27940-28019
  source 1..80: mol_type = other DNA
atttcagtataagaaggaaatcaccatattgcagatccgaggtgaacgctatgttttaactatctaacacggagtcggag

SEQ ID NO: 15564 - DNA, 80 bp, synthetic construct
  misc_feature 1..80: note = Synthetic: >Anlong-cand-28020-28099
  source 1..80: mol_type = other DNA
tgatttaaagatcgccttgacgagccaacaatggaagagccgacacgtgatttagctacgcatagttactaacttaagac

SEQ ID NO: 15565 - DNA, 80 bp, synthetic construct
  misc_feature 1..80: note = Synthetic: >AvianCoV-cand-40-119
  source 1..80: mol_type = other DNA
ctagatttccaacttaacaaaacggacttaaatacctacagctggtccctataggtgttccattgcagtgcactttagtg

SEQ ID NO: 15566 - DNA, 80 bp, synthetic construct
  misc_feature 1..80: note = Synthetic: >AvianCoV-cand-120-199
  source 1..80: mol_type = other DNA
ccctggatggcacctggccacctgtcaggttttagttattaaaataatattgttgctagtatcactgcttgttttgttgt

SEQ ID NO: 15567 - DNA, 80 bp, synthetic construct
  misc_feature 1..80: note = Synthetic: >AvianCoV-cand-200-279
  source 1..80: mol_type = other DNA
gtctcactttattacatccgttgcttgggctacctagtgtccagcgtcctgcgggcgccgtggtcggttcgagtgcgaag

SEQ ID NO: 15568 - DNA, 80 bp, synthetic construct
  misc_feature 1..80: note = Synthetic: >AvianCoV-cand-280-359
  source 1..80: mol_type = other DNA
aacctctggttcatctagcggtacgcgggtgtgtggaagtagcgcttcagacgtaccggtgtttctgttgtgtgaaacac

SEQ ID NO: 15569 - DNA, 80 bp, synthetic construct
  misc_feature 1..80: note = Synthetic: >AvianCoV-cand-360-439
  source 1..80: mol_type = other DNA
ggggtcacctccccccacatacctctaagggcttttgagcctagcgttgggctacgttctcgcacaaggtcggctatacg

SEQ ID NO: 15570 - DNA, 80 bp, synthetic construct
  misc_feature 1..80: note = Synthetic: >AvianCoV-cand-440-519
  source 1..80: mol_type = other DNA
acgtttgtagggggtagtgccgaacaacccctgaggtgacaggttctggtggtgtttagtgagcagacatacaatagaca

SEQ ID NO: 15571 - DNA, 80 bp, synthetic construct
  misc_feature 1..80: note = Synthetic: >AvianCoV-cand-520-599
  source 1..80: mol_type = other DNA
gtgacaacatggcttcaagcctaaaacagggagtatcttcccaaaaccagaggaatgtcattcttgttgccaaagacatt

SEQ ID NO: 15572 - DNA, 80 bp, synthetic construct
  misc_feature 1..80: note = Synthetic: >AvianCoV-cand-600-679
  source 1..80: mol_type = other DNA
cccgaacaactctgtgacgctttgtttttctatacgtcacacaacccaaaagattacgctgatgcttttgcctttaggca

SEQ ID NO: 15573 - DNA, 80 bp, synthetic construct
  misc_feature 1..80: note = Synthetic: >AvianCoV-cand-680-759
  source 1..80: mol_type = other DNA
gaagtttgaccgtaatctcggtgctgggaagcagtttaaatttgaaactgtgtgtggtccattcttcttgaagggagtgg

SEQ ID NO: 15574 - DNA, 80 bp, synthetic construct
  misc_feature 1..80: note = Synthetic: >AvianCoV-cand-760-839
  source 1..80: mol_type = other DNA
acaaaataacaccaggagtcccagccaaagttttaaaagccacttctaagttggctgatttagaagacatctttggtgtc

SEQ ID NO: 15575 - DNA, 80 bp, synthetic construct
  misc_feature 1..80: note = Synthetic: >AvianCoV-cand-840-919
  source 1..80: mol_type = other DNA
tctcctcttgcacggaaataccgtgaattgttgaaaacagcatgccagtggtctctcactgtagaaacactggatgctcg

SEQ ID NO: 15576 - DNA, 80 bp, synthetic construct
  misc_feature 1..80: note = Synthetic: >AvianCoV-cand-920-999
  source 1..80: mol_type = other DNA
tgcacaaactcttgaagaaatctttgacccaactgaaatactttggcttcaggtggctgcaaagattcaagtttcagcta

SEQ ID NO: 15577 - DNA, 80 bp, synthetic construct
  misc_feature 1..80: note = Synthetic: >Beluga-cand-8740-8819
  source 1..80: mol_type = other DNA
tagaggtgctgtatacgccacctagatttggtgttaatttggttacgaggctacaagcaggtataaagaagatggtcgct

SEQ ID NO: 15578 - DNA, 80 bp, synthetic construct
  misc_feature 1..80: note = Synthetic: >Beluga-cand-8820-8899
  source 1..80: mol_type = other DNA
ccttcgtctgctgtagaacagtgtgtagtatctgttgtgcatggtaacacacagcttaatggtttatggttgaatgatta

SEQ ID NO: 15579 - DNA, 80 bp, synthetic construct
  misc_feature 1..80: note = Synthetic: >Beluga-cand-8900-8979
  source 1..80: mol_type = other DNA
tgtgctatgcccccgtcatatacttggtaagtatactggggagcaatggagagatgcacttattaatgctaataattttg

SEQ ID NO: 15580 - DNA, 80 bp, synthetic construct
  misc_feature 1..80: note = Synthetic: >Beluga-cand-8980-9059
  source 1..80: mol_type = other DNA
atttccatattttgtataagggtatggaacttcaagttgtgggccgtgaattggtaggcgcacttttaaaattgaaagtt

SEQ ID NO: 15581 - DNA, 80 bp, synthetic construct
  misc_feature 1..80: note = Synthetic: >Beluga-cand-9020-9099
  source 1..80: mol_type = other DNA
gggccgtgaattggtaggcgcacttttaaaattgaaagtttctatggtaaatgctaatacacctaagtataagtttgcca

SEQ ID NO: 15582 - DNA, 80 bp, synthetic construct
  misc_feature 1..80: note = Synthetic: >Beluga-cand-9100-9179
  source 1..80: mol_type = other DNA
aagctagaattggtgataacttttccattgcttgtgcttataatggacatgtttctggtttgtacactgttacactccga

SEQ ID NO: 15583 - DNA, 80 bp, synthetic construct
  misc_feature 1..80: note = Synthetic: >Beluga-cand-9180-9259
  source 1..80: mol_type = other DNA
gaaaatggaacacttaaaggtagcttcatgtcaggatcgtgtggtagtgttggttataatgtgactaatgaaggtgttga

SEQ ID NO: 15584 - DNA, 80 bp, synthetic construct
  misc_feature 1..80: note = Synthetic: >Beluga-cand-9260-9339
  source 1..80: mol_type = other DNA
atttgtttatatgcaccatttggaacttccagggtgcgtgcatggtggtagtgaccttcatggcatgttttatggtggtt

SEQ ID NO: 15585 - DNA, 80 bp, synthetic construct
  misc_feature 1..80: note = Synthetic: >Beluga-cand-9340-9419
  source 1..80: mol_type = other DNA
atgtagatgaagaagtacttcagaggatacctcctgcaccagctaactcacgtaatattgttgcgtggttgtatgctgca

SEQ ID NO: 15586 - DNA, 80 bp, synthetic construct
  misc_feature 1..80: note = Synthetic: >Beluga-cand-9420-9499
  source 1..80: mol_type = other DNA
gtctataataactgtgattggtttgtgaaatacggacctaagcaagttatgtctgtagaagattttaatgagtgggcatc

SEQ ID NO: 15587 - DNA, 80 bp, synthetic construct
  misc_feature 1..80: note = Synthetic: >Beluga-cand-9500-9579
  source 1..80: mol_type = other DNA
tggatatggttttaccaaatttgagtaccaccttgcttttgatgtgttttcagcagcaactggagtttctgtggagcaga

SEQ ID NO: 15588 - DNA, 80 bp, synthetic construct
  misc_feature 1..80: note = Synthetic: >Beluga-cand-9580-9659
  source 1..80: mol_type = other DNA
tgcttgcagccttaaaggagttggctgatgggtggaattatgcccctattttgggttcattccatcttgatgatgaatat

SEQ ID NO: 15589 - DNA, 80 bp, synthetic construct
  misc_feature 1..80: note = Synthetic: >Beluga-cand-9660-9739
  source 1..80: mol_type = other DNA
tctcctgaaatgattatgcaacaaactagtggcattgttctacagagcaatgtaaagaaggccactaaaggttttctatc

SEQ ID NO: 15590 - DNA, 80 bp, synthetic construct
  misc_feature 1..80: note = Synthetic: >Beluga-cand-9740-9819
  source 1..80: mol_type = other DNA
taggttgggttattggcttgttatggtaatattgacagtgtacgcatcttgtaatgtagttccacttgatatgttgccac

SEQ ID NO: 15591 - DNA, 80 bp, synthetic construct
  misc_feature 1..80: note = Synthetic: >Beluga-cand-9820-9899
  source 1..80: mol_type = other DNA
agttgattatgagtgttggtgtaggttttgctataatgtttgttactttgaagcaccaacatttctttatgacaactgcc

SEQ ID NO: 15592 - DNA, 80 bp, synthetic construct
  misc_feature 1..80: note = Synthetic: >Beluga-cand-9900-9979
  source 1..80: mol_type = other DNA
ataattccctatgttgttactagtattttgggtatggcacttgagaagcctgtgttttataatggatggtacttcagctt

SEQ ID NO: 15593 - DNA, 80 bp, synthetic construct
  misc_feature 1..80: note = Synthetic: >Beluga-cand-22750-22829
  source 1..80: mol_type = other DNA
ttcccagctgtcttcagatataactttgctttgtatgaggttacgcagtgcactagggaagtagcgcaattagccgtagc

SEQ ID NO: 15594 - DNA, 80 bp, synthetic construct
  misc_feature 1..80: note = Synthetic: >Beluga-cand-22830-22909
  source 1..80: mol_type = other DNA
ctccaataatgctctgggttattatttgcctaagcaggttaatattgaaggcttgaatgatactgtagattgtaatatca

SEQ ID NO: 15595 - DNA, 80 bp, synthetic construct
  misc_feature 1..80: note = Synthetic: >Beluga-cand-22910-22989
  source 1..80: mol_type = other DNA
cgggtgctttcaagtattgttcatatggttctattcaggcagctttgtccgaagaagttcaagtaatgtcaccattaatg

SEQ ID NO: 15596 - DNA, 80 bp, synthetic construct
  misc_feature 1..80: note = Synthetic: >Beluga-cand-22990-23069
  source 1..80: mol_type = other DNA
tgtgtaacccttctcttatgatggaaaattcgcactgtattaatttaaaaggctcatttatggttaatgaacccagtgtt

SEQ ID NO: 15597 - DNA, 80 bp, synthetic construct
  misc_feature 1..80: note = Synthetic: >Beluga-cand-23070-23149
  source 1..80: mol_type = other DNA
acattaaattcaactacttaccagccccttttaggagtgtctggagaagttgttttacctcgtactttaatgctacatac

SEQ ID NO: 15598 - DNA, 80 bp, synthetic construct
  misc_feature 1..80: note = Synthetic: >Beluga-cand-23150-23229
  source 1..80: mol_type = other DNA
gactactgagtttattcaaacccatagtcctaagattgttatagattgcaataaatacgtgtgcggtagttctgagagat

SEQ ID NO: 15599 - DNA, 80 bp, synthetic construct
  misc_feature 1..80: note = Synthetic: >Beluga-cand-23230-23309
  source 1..80: mol_type = other DNA
gcaggcgtatacttattaagtatggtggcttttgtgaaagcatcatacgtttacttaatggcgttaacatggcagatgat

SEQ ID NO: 15600 - DNA, 80 bp, synthetic construct
  misc_feature 1..80: note = Synthetic: >Beluga-cand-23310-23389
  source 1..80: mol_type = other DNA
gtcagtgttaccgattttcttgataactttaatagttttgataacatctctatttcgttacagagtttaaatgatagctt

SEQ ID NO: 15601 - DNA, 80 bp, synthetic construct
  misc_feature 1..80: note = Synthetic: >Beluga-cand-23390-23469
  source 1..80: mol_type = other DNA
tggttcttttgatggttatggctttcagaagtttttacctaagtcttttgattttggcagtggtgatccccgtcaatcgc

SEQ ID NO: 15602 - DNA, 80 bp, synthetic construct
  misc_feature 1..80: note = Synthetic: >Beluga-cand-23470-23549
  source 1..80: mol_type = other DNA
ggtcaaccatagaagatttattgtttgataaggttacaactgtgggtcttggcactgttgatgcagactatgacaagtgt

SEQ ID NO: 15603 - DNA, 80 bp, synthetic construct
  misc_feature 1..80: note = Synthetic: >Beluga-cand-23550-23629
  source 1..80: mol_type = other DNA
accaaaggattgtcggtagcagacttagtttgcgctcagtattataatggaattatggttttacctggtgttgcagatgc

SEQ ID NO: 15604 - DNA, 80 bp, synthetic construct
  misc_feature 1..80: note = Synthetic: >Beluga-cand-23630-23709
  source 1..80: mol_type = other DNA
cgagaagatggcaatgtacactggtgcattagtaggtggtatggcattaggtggcataactgctgccgcatctatacctt

SEQ ID NO: 15605 - DNA, 80 bp, synthetic construct
  misc_feature 1..80: note = Synthetic: >Beluga-cand-23700-23779
  source 1..80: mol_type = other DNA
tctataccttttgcaactcaaatacaagctcgtgtcaattatcttgcgcttacccagaatgctattcaggaaaatcaaaa

SEQ ID NO: 15606 - DNA, 80 bp, synthetic construct
  misc_feature 1..80: note = Synthetic: >Beluga-cand-23780-23859
  source 1..80: mol_type = other DNA
gataattgtccagcagtttaataaggctattgactctatgacttctgcatttgaaagcgttaatgcaggcttcagtgcag

SEQ ID NO: 15607 - DNA, 80 bp, synthetic construct
  misc_feature 1..80: note = Synthetic: >Beluga-cand-23860-23939
  source 1..80: mol_type = other DNA
tgtctagtgcaataactgagattcagaacacggtgaacgctcagtcacaggcgttgactaagttgttaggtcaattaaat

SEQ ID NO: 15608 - DNA, 80 bp, synthetic construct
  misc_feature 1..80: note = Synthetic: >Beluga-cand-23940-24019
  source 1..80: mol_type = other DNA
tataattttggtgcaacgactagctcgattaaagaactttatgagagactagcccagttggaagctgatatccaagtgga

SEQ ID NO: 15609 - DNA, 80 bp, synthetic construct
  misc_feature 1..80: note = Synthetic: >BetaSp-cand-5400-5479
  source 1..80: mol_type = other DNA
cttactgttgatggtttcaatttcaagaccaagtcagttgtttgtggtgaagcttttggtaagcaggtgggtaatgtgtt

SEQ ID NO: 15610 - DNA, 80 bp, synthetic construct
  misc_feature 1..80: note = Synthetic: >BetaSp-cand-5480-5559
  source 1..80: mol_type = other DNA
ttgtgaaaatgttgatgttaccaagcacattgtcactaaagagcatgcaggcaaagtactctaccagtttgagaacttgt

SEQ ID NO: 15611 - DNA, 80 bp, synthetic construct
  misc_feature 1..80: note = Synthetic: >BetaSp-cand-5560-5639
  source 1..80: mol_type = other DNA
ctgaagctgaattagattctgttaaacaatcctttgggtttgaccagaagcagcttcttgcttattacagctatcgcagt

SEQ ID NO: 15612 - DNA, 80 bp, synthetic construct
  misc_feature 1..80: note = Synthetic: >BetaSp-cand-5960-6039
  source 1..80: mol_type = other DNA
aaaacgtgacggtattgatgcagtcatgttttatggtacttgtgataagcaggcactagaaaagggtgctactacagatt

SEQ ID NO: 15613 - DNA, 80 bp, synthetic construct
  misc_feature 1..80: note = Synthetic: >BetaSp-cand-6040-6119
  source 1..80: mol_type = other DNA
gtagttgtggacccaaaactgtgcatttgcttagcatgaatgtgccattctttattggcagtcaggctcctgctgttgga

SEQ ID NO: 15614 - DNA, 80 bp, synthetic construct
  misc_feature 1..80: note = Synthetic: >BetaSp-cand-6120-6199
  source 1..80: mol_type = other DNA
gtcttgcctaatggttgtactgctgctaacttgtatagaggtggtgctgttggccattatactcatgttaagaatggcaa

SEQ ID NO: 15615 - DNA, 80 bp, synthetic construct
  misc_feature 1..80: note = Synthetic: >BetaSp-cand-6260-6339
  source 1..80: mol_type = other DNA
tacagattgtctgtacactaatgtgcctaagcaaacatttgagtcgtgtcttacgacatattatttagatgatgtgaaac

SEQ ID NO: 15616 - DNA, 80 bp, synthetic construct
  misc_feature 1..80: note = Synthetic: >BetaSp-cand-6340-6419
  source 1..80: mol_type = other DNA
atgttgaatataagcctgatctctcgcaatattactgtgagggtggtcggtattacactcaacgtatagttaaagcacaa

SEQ ID NO: 15617 - DNA, 80 bp, synthetic construct
  misc_feature 1..80: note = Synthetic: >BetaSp-cand-6420-6499
  source 1..80: mol_type = other DNA
tttaaaacttttgaggctgtcgatggtgtgtacacaaactttgagcttgtgggtcatgccttatgtgatactctcaatgt

SEQ ID NO: 15618 - DNA, 80 bp, synthetic construct
  misc_feature 1..80: note = Synthetic: >BetaSp-cand-6500-6579
  source 1..80: mol_type = other DNA
taaattgggctttgattctactaaagattcagttcaatataaggttaccgtctggcctgatgcaactggtgatgttgtgt

SEQ ID NO: 15619 - DNA, 80 bp, synthetic construct
  misc_feature 1..80: note = Synthetic: >BetaSp-cand-6580-6659
  source 1..80: mol_type = other DNA
tagcagatgatgacttgtatgtcaagcgctataaaaagggttgcataacatttggcaaaccagttatctggcagagccat

SEQ ID NO: 15620 - DNA, 80 bp, synthetic construct
  misc_feature 1..80: note = Synthetic: >CDPHE15-cand-11970-12049
  source 1..80: mol_type = other DNA
ccttgtaagtttttggtagacacacccaacggaccacatgtaaaatttttgtactttgtgcggaatcttaacacacttcg

SEQ ID NO: 15621 - DNA, 80 bp, synthetic construct
  misc_feature 1..80: note = Synthetic: >CDPHE15-cand-12050-12129
  source 1..80: mol_type = other DNA
acgtggtgctgttctcggtttcgttggtgcaacagtaagattacaggcaggtaagcaaactgagcaagttatgaattctt

SEQ ID NO: 15622 - DNA, 80 bp, synthetic construct
  misc_feature 1..80: note = Synthetic: >CDPHE15-cand-12130-12209
  source 1..80: mol_type = other DNA
ctctattgactatgtgtgccttttctactgatccagctaagacatatcttgatgcagttaagagtggtgttaagccaatt

SEQ ID NO: 15623 - DNA, 80 bp, synthetic construct
  misc_feature 1..80: note = Synthetic: >CDPHE15-cand-12210-12289
  source 1..80: mol_type = other DNA
ggtaactgtgttaaaatgttggctaatggtgctggtaacggacaggctatcactaatggtgttgaggctaatactagtca

SEQ ID NO: 15624 - DNA, 80 bp, synthetic construct
  misc_feature 1..80: note = Synthetic: >CDPHE15-cand-12290-12369
  source 1..80: mol_type = other DNA
agactcatatggtggtgcgtctgtttgtctgtggtgtagagcttatgttgaacatccagctatggatggcttttgtaagt

SEQ ID NO: 15625 - DNA, 80 bp, synthetic construct
  misc_feature 1..80: note = Synthetic: >CDPHE15-cand-12370-12449
  source 1..80: mol_type = other DNA
ataaaggcaagtatgtccaggtacctattggaactgtcgatcctattaggtattgtcttgagaatgaggtttgcaaagtt

SEQ ID NO: 15626 - DNA, 80 bp, synthetic construct
  misc_feature 1..80: note = Synthetic: >CDPHE15-cand-12450-12529
  source 1..80: mol_type = other DNA
tgtggatgctggttgaataacggttgttcttgtgataggacatctattgtccaaagctttgacagcagttatttaaacga

SEQ ID NO: 15627 - DNA, 80 bp, synthetic construct
  misc_feature 1..80: note = Synthetic: >CDPHE15-cand-12610-12689
  source 1..80: mol_type = other DNA
taacaaggatgtcgcatgtataggtcagtttcttaaggtgaactgcgttcgttttaagaatactgacatgcatgacgcat

SEQ ID NO: 15628 - DNA, 80 bp, synthetic construct
  misc_feature 1..80: note = Synthetic: >CDPHE15-cand-12680-12759
  source 1..80: mol_type = other DNA
catgacgcattttatgttataaagcgctgtactaagtctgtcatggatcacgagcagtccatatatgacaaacttgcaaa

SEQ ID NO: 15629 - DNA, 80 bp, synthetic construct
  misc_feature 1..80: note = Synthetic: >CDPHE15-cand-12760-12839
  source 1..80: mol_type = other DNA
atgtgatgcagttgcaaaacatgatttcttcacctggaaggaaggtaggtcaatctatggtaatgtttgtaggtgtaatc

SEQ ID NO: 15630 - DNA, 80 bp, synthetic construct
  misc_feature 1..80: note = Synthetic: >CDPHE15-cand-12840-12919
  source 1..80: mol_type = other DNA
ttacaaaatataccatgatggatctctgttttgcattgcgtaattttgatgagcgtaactgtcaaacccttaaagagatt

SEQ ID NO: 15631 - DNA, 80 bp, synthetic construct
  misc_feature 1..80: note = Synthetic: >CDPHE15-cand-12920-12999
  source 1..80: mol_type = other DNA
ttagtcttgactggtgcctgtgatgaatcttattttgaaaataaactctggttcgaccctgttgagaatgaggacataca

SEQ ID NO: 15632 - DNA, 80 bp, synthetic construct
  misc_feature 1..80: note = Synthetic: >CDPHE15-cand-13000-13079
  source 1..80: mol_type = other DNA
ccgtgtttatgccaagttaggcgtcgtagtggcacgtgctatgcttaattgtgtgaagctttgtgatgctatggtcaaag

SEQ ID NO: 15633 - DNA, 80 bp, synthetic construct
  misc_feature 1..80: note = Synthetic: >CDPHE15-cand-13080-13159
  source 1..80: mol_type = other DNA
ctggcatagtgggtgttttgacgcttgacaatcaagaccttaatggtaagttctatgattttggtgactttgtccctagt

SEQ ID NO: 15634 - DNA, 80 bp, synthetic construct
  misc_feature 1..80: note = Synthetic: >CDPHE15-cand-13160-13239
  source 1..80: mol_type = other DNA
cttgagggtatgggtgtgccattatgtacctcttattactcttatatgatgcctataatgggtatgactaattgtttggc

SEQ ID NO: 15635 - DNA, 80 bp, synthetic construct
  misc_feature 1..80: note = Synthetic: >Delta-cand-1360-1439
  source 1..80: mol_type = other DNA
gccactattaaggtaaccgatggtaaggctgaagcaattgcaggtcgaactaagcctctgtctgctgaggccactaaagg

SEQ ID NO: 15636 - DNA, 80 bp, synthetic construct
  misc_feature 1..80: note = Synthetic: >Delta-cand-1440-1519
  source 1..80: mol_type = other DNA
caagcaaatcgttacagaggatgtcaaccttctccctgactatcagcagctgcttgttgatcaacccctgtgactggcac

SEQ ID NO: 15637 - DNA, 80 bp, synthetic construct
  misc_feature 1..80: note = Synthetic: >Delta-cand-1520-1599
  source 1..80: mol_type = other DNA
tgaggttaaggttggagctctaacctatgttaagaccactgattcaccacccctttactttcccaaagtcaagggtggtg

SEQ ID NO: 15638 - DNA, 80 bp, synthetic construct
  misc_feature 1..80: note = Synthetic: >Delta-cand-1600-1679
  source 1..80: mol_type = other DNA
ttattggtattgcacttaagcagcagggcactgcggctaagaagctcaatgtagtcttccatgctcaacctgatgatgtt

SEQ ID NO: 15639 - DNA, 80 bp, synthetic construct
  misc_feature 1..80: note = Synthetic: >Delta-cand-1680-1759
  source 1..80: mol_type = other DNA
ctgctagccttcatacaacttcagcaattcttgaaccgtacttcggattcaagtgttgaaattactgattgccagagagg

SEQ ID NO: 15640 - DNA, 80 bp, synthetic construct
  misc_feature 1..80: note = Synthetic: >Delta-cand-1760-1839
  source 1..80: mol_type = other DNA
tatgatttatgaagtatctccaactgtgacggtcaaaattggcccgtctaaacctggggatgtcatcgtggctactgatg

SEQ ID NO: 15641 - DNA, 80 bp, synthetic construct
  misc_feature 1..80: note = Synthetic: >Delta-cand-1840-1919
  source 1..80: mol_type = other DNA
aggaataccttaaatgctttgaaacccctgaggtaggtaggctctataaggttttccaaactcaatcttgggctatcatt

SEQ ID NO: 15642 - DNA, 80 bp, synthetic construct
  misc_feature 1..80: note = Synthetic: >Delta-cand-1920-1999
  source 1..80: mol_type = other DNA
gagcgtgccttctccagtttgaagatccgcgtgtccaaagctttatcagcatttataagttttctgcaaaaccttgcaga

SEQ ID NO: 15643 - DNA, 80 bp, synthetic construct
  misc_feature 1..80: note = Synthetic: >Delta-cand-2000-2079
  source 1..80: mol_type = other DNA
taactttactggcttaacaaggtagcacaccgctgtggaggtgcaataagtggtgttgtcactgcactcattcgtgaact

SEQ ID NO: 15644 - DNA, 80 bp, synthetic construct
  misc_feature 1..80: note = Synthetic: >Delta-cand-2080-2159
  source 1..80: mol_type = other DNA
ccagttgactcttatgaaagcagagaagttagatcttaccctggatgtggcgacacgtatcactaacatacaatttgttt

SEQ ID NO: 15645 - DNA, 80 bp, synthetic construct
  misc_feature 1..80: note = Synthetic: >Delta-cand-2160-2239
  source 1..80: mol_type = other DNA
accgtgccggtaagcttattgtcgacacgacaagtgtcatagctaaacttttccagccattttgtgattttatatcacct

SEQ ID NO: 15646 - DNA, 80 bp, synthetic construct
  misc_feature 1..80: note = Synthetic: >Delta-cand-2240-2319
  source 1..80: mol_type = other DNA
ttccttcggaaagttgctggagcattcaaagaaattttgcaatttacactgttggtcaatcacaaaaaatcgcatgctta

SEQ ID NO: 15647 - DNA, 80 bp, synthetic construct
  misc_feature 1..80: note = Synthetic: >Delta-cand-2320-2399
  source 1..80: mol_type = other DNA
tgtttaccagcactggcacctttcttctcacaaaggcaactactaagatactcaataaggcaaagtacatctttctatgg

SEQ ID NO: 15648 - DNA, 80 bp, synthetic construct
  misc_feature 1..80: note = Synthetic: >Delta-cand-2400-2479
  source 1..80: mol_type = other DNA
agcaaaagatgtggagcctgagtacccagtagatgtaacaacatccaaagttgtagtacatgaagcatgggttaatacac

SEQ ID NO: 15649 - DNA, 80 bp, synthetic construct
  misc_feature 1..80: note = Synthetic: >Delta-cand-2560-2639
  source 1..80: mol_type = other DNA
atggctactgatggcactgcgttctacccatcggatggtacgcacgcctctcttccaaattatatagatggagtctattt

SEQ ID NO: 15650 - DNA, 80 bp, synthetic construct
  misc_feature 1..80: note = Synthetic: >Delta-cand-6460-6539
  source 1..80: mol_type = other DNA
gcaggtgagcccttggtttgtcaagcctgttttgacggtcaagactccctacatttgtatccgcatttacgtgttaatca

SEQ ID NO: 15651 - DNA, 80 bp, synthetic construct
  misc_feature 1..80: note = Synthetic: >Delta-cand-6540-6619
  source 1..80: mol_type = other DNA
gcagccccttcagaccactgacataaattacactgtttatgcgctttcactaatactactattagctaacatgactcttg

SEQ ID NO: 15652 - DNA, 80 bp, synthetic construct
  misc_feature 1..80: note = Synthetic: >Delta-cand-6620-6699
  source 1..80: mol_type = other DNA
tcatgggcacgctaatagttactttctttgtgaacttctatggtgtgcaaataccattttatggtacacttttgatagat

SEQ ID NO: 15653 - DNA, 80 bp, synthetic construct
  misc_feature 1..80: note = Synthetic: >Delta-cand-6700-6779
  source 1..80: mol_type = other DNA
tatcaatccgcactggtgatgactttctcagtgtactacttttataaggtaatgaagtttttccgccatctcacacatgg

SEQ ID NO: 15654 - DNA, 80 bp, synthetic construct
  misc_feature 1..80: note = Synthetic: >Delta-cand-6780-6859
  source 1..80: mol_type = other DNA
atgtaaaattccaacgtgtgtggtatgtgctaaacttcgtaccccacctactataacagttgagactgtcgttcagggca

SEQ ID NO: 15655 - DNA, 80 bp, synthetic construct
  misc_feature 1..80: note = Synthetic: >Delta-cand-6860-6939
  source 1..80: mol_type = other DNA
ggaaatacccatctgttattgaaacaaatggcgggtttacaatttgtaaagaacacaacttctattgcaaggactgcgaa

SEQ ID NO: 15656 - DNA, 80 bp, synthetic construct
  misc_feature 1..80: note = Synthetic: >Delta-cand-6940-7019
  source 1..80: mol_type = other DNA
tctttacaaacacccggcactttcatcccgacagaagctattgagtcgctctcacgagctaccaggcttagtgtcaaacc

SEQ ID NO: 15657 - DNA, 80 bp, synthetic construct
  misc_feature 1..80: note = Synthetic: >Delta-cand-7020-7099
  source 1..80: mol_type = other DNA
aacagcaccagcattcttacttgctagagatgttgagtgccaaactgatgttgtcgttgctcgcgcaatgcataaccaaa

SEQ ID NO: 15658 - DNA, 80 bp, synthetic construct
  misc_feature 1..80: note = Synthetic: >Delta-cand-7100-7179
  source 1..80: mol_type = other DNA
atgcgcatgtgtgcatttcaaaatactctgatatccgtaccgttgaccaactacttaagcctactccactgttttcatac

SEQ ID NO: 15659 - DNA, 80 bp, synthetic construct
  misc_feature 1..80: note = Synthetic: >Delta-cand-7260-7339
  source 1..80: mol_type = other DNA
aatggaccttaaacgtactataattatcattgatcaggcctattctagacccattgataattatcaggaagttgcttctc

SEQ ID NO: 15660 - DNA, 80 bp, synthetic construct
  misc_feature 1..80: note = Synthetic: >Delta-cand-7340-7419
  source 1..80: mol_type = other DNA
gtattgagaagtattacccagttgcaaagatcacacccacaggtgacatctttacagacattaagcaagcgaccaatggc

SEQ ID NO: 15661 - DNA, 80 bp, synthetic construct
  misc_feature 1..80: note = Synthetic: >Delta-cand-7420-7499
  source 1..80: mol_type = other DNA
caagctagtgactctgctattaatgcagctgttctggctgtccagcgcggtcttgattttacaattgacaaccctaacaa

SEQ ID NO: 15662 - DNA, 80 bp, synthetic construct
  misc_feature 1..80: note = Synthetic: >Delta-cand-7500-7579
  source 1..80: mol_type = other DNA
catattaccacattacgcctttgacttttcaaccctcaatgcagaagaccagtctaccattttggagagtggttgtgcta

SEQ ID NO: 15663 - DNA, 80 bp, synthetic construct
  misc_feature 1..80: note = Synthetic: >Delta-cand-7580-7659
  source 1..80: mol_type = other DNA
aaggcaatctcaagggcactaatgttggtgttgttctttcagctagccttgttacacgtcttagtcagcaggctatacgt

SEQ ID NO: 15664 - DNA, 80 bp, synthetic construct
  misc_feature 1..80: note = Synthetic: >Delta-cand-7660-7739
  source 1..80: mol_type = other DNA
gtgattgctaatgctgcttcacgtaatggtgttacatgcgctgttactccatctacacttgttatgcgtgggaatattgc

SEQ ID NO: 15665 - DNA, 80 bp, synthetic construct
  misc_feature 1..80: note = Synthetic: >Delta-cand-10390-10469
  source 1..80: mol_type = other DNA
ccatgctactcgctgccataatattgtggcatgttttccctgtacacttgtacccaatagtactgccatgcttcactgtc

SEQ ID NO: 15666 - DNA, 80 bp, synthetic construct
  misc_feature 1..80: note = Synthetic: >Delta-cand-10550-10629
  source 1..80: mol_type = other DNA
ggttgtaaatgctaacactttttggataccgaacacatttctgcggcagatagtctacacctgctacgaaactatattcg

SEQ ID NO: 15667 - DNA, 80 bp, synthetic construct
  misc_feature 1..80: note = Synthetic: >Delta-cand-10630-10709
  source 1..80: mol_type = other DNA
ttaatttaaggttccccaattgctcagcgacagttgtttttgttgtatggttacactgtattagtgctctttatatgctg

SEQ ID NO: 15668 - DNA, 80 bp, synthetic construct
  misc_feature 1..80: note = Synthetic: >Delta-cand-10710-10789
  source 1..80: mol_type = other DNA
atctatgctggacttgcaatcaactatacgttgaaaacactccggtatagagcagtgtgggcattgtacttcattcttat

SEQ ID NO: 15669 - DNA, 80 bp, synthetic construct
  misc_feature 1..80: note = Synthetic: >Delta-cand-10790-10869
  source 1..80: mol_type = other DNA
ctttttgcatgcagtggtttctaaatatggttatgttgcacacattgcgtacaaactgcttaataaaccctggacagaat

SEQ ID NO: 15670 - DNA, 80 bp, synthetic construct
  misc_feature 1..80: note = Synthetic: >Delta-cand-10870-10949
  source 1..80: mol_type = other DNA
cactactcttcacagccttcacaatgctaaccagtcatctggttctttgttggctgctcttagctggtggctagctggtc

SEQ ID NO: 15671 - DNA, 80 bp, synthetic construct
  misc_feature 1..80: note = Synthetic: >Delta-cand-10950-11029
  source 1..80: mol_type = other DNA
gcgtaactctgcccattatcatgcctgacttagctattcgtgttttggcgtataacgtcattggctatgtcatatgtgtt

SEQ ID NO: 15672 - DNA, 80 bp, synthetic construct
  misc_feature 1..80: note = Synthetic: >Delta-cand-11030-11109
  source 1..80: mol_type = other DNA
cgatttggccttatgtggcttgcaaatcggttcacaactgtacctatgggcacataccagtatatggtgtctgtagagca

SEQ ID NO: 15673 - DNA, 80 bp, synthetic construct
  misc_feature 1..80: note = Synthetic: >Delta-cand-11110-11189
  source 1..80: mol_type = other DNA
acttaagtacatgatggcagttaagatgtccccaccgcgtaatgcgtttgaggtgcttatagccaacattagacttcttg

SEQ ID NO: 15674 - DNA, 80 bp, synthetic construct
  misc_feature 1..80: note = Synthetic: >Delta-cand-11190-11269
  source 1..80: mol_type = other DNA
gtttgggtggaaaccgtaacattgctgtttctactgtccaaaacaaaattcttgatgcaaaagctactgctgttgttgtt

SEQ ID NO: 15675 - DNA, 80 bp, synthetic construct
  misc_feature 1..80: note = Synthetic: >Delta-cand-11270-11349
  source 1..80: mol_type = other DNA
gctaaccttcttgaaaaggctggcgtcacaaacaagcacgctatttgcaaaaagattgtgaaactccacaatgataccct

SEQ ID NO: 15676 - DNA, 80 bp, synthetic construct
  misc_feature 1..80: note = Synthetic: >Delta-cand-11350-11429
  source 1..80: mol_type = other DNA
taaagccaccacttatgaggaggttgaggtagcacttgtgaaacttctttctcacataattgagttcttgccaactgatc

SEQ ID NO: 15677 - DNA, 80 bp, synthetic construct
  misc_feature 1..80: note = Synthetic: >Delta-cand-11430-11509
  source 1..80: mol_type = other DNA
aggtagatgcttatctagctgatgcggccaatgctcaacatgttaatacctattttgacaacttgcttgagaacaaagct

SEQ ID NO: 15678 - DNA, 80 bp, synthetic construct
  misc_feature 1..80: note = Synthetic: >Delta-cand-11510-11589
  source 1..80: mol_type = other DNA
gttgttcaggctgttgccgatatcaacattaatctggattcttatagaatttataaggaggcagatgctatttataaacg

SEQ ID NO: 15679 - DNA, 80 bp, synthetic construct
  misc_feature 1..80: note = Synthetic: >Delta-cand-12870-12949
  source 1..80: mol_type = other DNA
accagaattcggcttatttaaacgagtaacgggttctagtgacgcccggctagaacccctgcagcctggaactcaaccag

SEQ ID NO: 15680 - DNA, 80 bp, synthetic construct
  misc_feature 1..80: note = Synthetic: >Delta-cand-12950-13029
  source 1..80: mol_type = other DNA
atgctgtaaaaagggccttccatgtgcataatgataccacctctggtatattcttaagcacaaaatctaactgcgctcgg

SEQ ID NO: 15681 - DNA, 80 bp, synthetic construct
  misc_feature 1..80: note = Synthetic: >Delta-cand-13030-13109
  source 1..80: mol_type = other DNA
tttaaaaccacacgcagtgccctgattattaacaagcctttacctaacaagggagaggttgaattgtactttgttactaa

SEQ ID NO: 15682 - DNA, 80 bp, synthetic construct
  misc_feature 1..80: note = Synthetic: >Delta-cand-13990-14069
  source 1..80: mol_type = other DNA
ctaaacactctattgcgattggtaggtgatcccaccaccattgcaagtgtctcagacaagtgtgtagatttaagaactcc

SEQ ID NO: 15683 - DNA, 80 bp, synthetic construct
  misc_feature 1..80: note = Synthetic: >HKU10-cand-30-109
  source 1..80: mol_type = other DNA
tagtaagtgtcactacttagaccttgtgtctcctcatctcaactaaacgaaattttatccatcgcacacatgttcagcat

SEQ ID NO: 15684 - DNA, 80 bp, synthetic construct
  misc_feature 1..80: note = Synthetic: >HKU10-cand-110-189
  source 1..80: mol_type = other DNA
gtgtttgcgtatggtgcaattgaaatttcattaggttgcctaatttgggtaacaagtgcagtgcgtcctagtggctctga

SEQ ID NO: 15685 - DNA, 80 bp, synthetic construct
  misc_feature 1..80: note = Synthetic: >HKU10-cand-190-269
  source 1..80: mol_type = other DNA
gtgagggttccgtcccctctcatccattacaaacgccctttgccagttccgtctggtgaagtgtgtggaagtcaagttcc

SEQ ID NO: 15686 - DNA, 80 bp, synthetic construct
  misc_feature 1..80: note = Synthetic: >HKU10-cand-270-349
  source 1..80: mol_type = other DNA
gtcttgtctgaaacctgtaactgtgcccaatggctagcaaccaattgacattggcttttgccaatgactctgagatttca

SEQ ID NO: 15687 - DNA, 80 bp, synthetic construct
  misc_feature 1..80: note = Synthetic: >HKU10-cand-350-429
  source 1..80: mol_type = other DNA
gcttatggctttgacaccgtcgagcatgccgtggcacaatatagtgctgccgcagctaacggttttgctcaatgccgatt

SEQ ID NO: 15688 - DNA, 80 bp, synthetic construct
  misc_feature 1..80: note = Synthetic: >HKU10-cand-430-509
  source 1..80: mol_type = other DNA
tgtcattactggcctgcaagacttggttgtgggtgttaacgatgaagagtttgttcttgtcgtgactggcttgcaccaac

SEQ ID NO: 15689 - DNA, 80 bp, synthetic construct
  misc_feature 1..80: note = Synthetic: >HKU10-cand-510-589
  source 1..80: mol_type = other DNA
tcacagcccgtattggcaaattcggtgaccaacctcaaaacttacgtggttggttgctgttctccaactccaactacttt

SEQ ID NO: 15690 - DNA, 80 bp, synthetic construct
  misc_feature 1..80: note = Synthetic: >HKU10-cand-590-669
  source 1..80: mol_type = other DNA
ttaggtgagttggatcttacttttggcaatcgcggtggtaccactgtttttgtcgacaactttttgtgtggtgccaatgg

SEQ ID NO: 15691 - DNA, 80 bp, synthetic construct
  misc_feature 1..80: note = Synthetic: >HKU10-cand-670-749
  source 1..80: mol_type = other DNA
tcttccagcttgttctgaacaagaatgggagtttaaagactattttggtgaacttgatgaagtcaccattaatggcacca

SEQ ID NO: 15692 - DNA, 80 bp, synthetic construct
  misc_feature 1..80: note = Synthetic: >HKU10-cand-750-829
  source 1..80: mol_type = other DNA
cttttgttaaagcatggaatgtggaccgtacaccaggaccttattcaacccaaaacttgctttccattaactctatttct

SEQ ID NO: 15693 - DNA, 80 bp, synthetic construct
  misc_feature 1..80: note = Synthetic: >HKU10-cand-830-909
  source 1..80: mol_type = other DNA
tggtgtggtgaaatcccacactcacttgctgacggttctattcgtagggttgctaaagtggtgaaaaagagtaagagtgt

SEQ ID NO: 15694 - DNA, 80 bp, synthetic construct
  misc_feature 1..80: note = Synthetic: >HKU10-cand-910-989
  source 1..80: mol_type = other DNA
tttgcttggcaaacagtttcaacaattgtatgacagtgttggttctccttttgttactaatggtaaaaaccttagtgatg

SEQ ID NO: 15695 - DNA, 80 bp, synthetic construct
  misc_feature 1..80: note = Synthetic: >HKU10-cand-990-1069
  source 1..80: mol_type = other DNA
tgcttgtgaagccaatttattgtcatgctcttgttaaatgccagtgtggcaaaacatcatggactgttggtgattggagt

SEQ ID NO: 15696 - DNA, 80 bp, synthetic construct
  misc_feature 1..80: note = Synthetic: >HKU10-cand-1070-1149
  source 1..80: mol_type = other DNA
tgttataagtctatgtgttgtggttttaactgtaaaccccttgccattgtcaacggagaagtcgtccctggtgatgttct

SEQ ID NO: 15697 - DNA, 80 bp, synthetic construct
  misc_feature 1..80: note = Synthetic: >HKU10-cand-1150-1229
  source 1..80: mol_type = other DNA
tgttaccagcgacaaagtatctgcctctgggactaagtactataatggtatggtgcttaagtttgtggacaaaattgaca

SEQ ID NO: 15698 - DNA, 80 bp, synthetic construct
  misc_feature 1..80: note = Synthetic: >HKU10-cand-1230-1309
  source 1..80: mol_type = other DNA
atgcttgcttgtggagaattacacaagttcagagttgcatggatgttgttgcgtccggcaattacaagggagatgaattc

SEQ ID NO: 15699 - DNA, 80 bp, synthetic construct
  misc_feature 1..80: note = Synthetic: >HKU10-cand-5140-5219
  source 1..80: mol_type = other DNA
ttgctgttctgccagatacagatgcagcaaattataacaaggatgttaaacgcacattgacaaaagtgtcaaagttaaaa

SEQ ID NO: 15700 - DNA, 80 bp, synthetic construct
  misc_feature 1..80: note = Synthetic: >HKU10-cand-5220-5299
  source 1..80: mol_type = other DNA
ggcaaaatattttgcacgataccaacagtagatgttatgaaacaaatgcttaagtgctgcaacacaagttttattgtaac

SEQ ID NO: 15701 - DNA, 80 bp, synthetic construct
  misc_feature 1..80: note = Synthetic: >HKU10-cand-5300-5379
  source 1..80: mol_type = other DNA
tgatgctaccaaaactcgattgtcagagtgttttgagtctgcagtagtagaagttaaagttacacatgacggtcgtgatg

SEQ ID NO: 15702 - DNA, 80 bp, synthetic construct
  misc_feature 1..80: note = Synthetic: >HKU10-cand-5380-5459
  source 1..80: mol_type = other DNA
tgcacaccgtcaaggttaagactgatgttgtacttgacgagcaagttggtgtttgcagtttgaataattgtgaccttact

SEQ ID NO: 15703 - DNA, 80 bp, synthetic construct
  misc_feature 1..80: note = Synthetic: >HKU10-cand-5460-5539
  source 1..80: mol_type = other DNA
ggtgttaaacctgatgatgctattgtagatgttgttagtgtagccccagaagttgattggatttcatattatggctttcc

SEQ ID NO: 15704 - DNA, 80 bp, synthetic construct
  misc_feature 1..80: note = Synthetic: >HKU10-cand-5540-5619
  source 1..80: mol_type = other DNA
tcgtgctgacctttatcatacgttagatcataaacaatatgcgtatgaaaatagtgatgttgaaggtaagcgtgttttga

SEQ ID NO: 15705 - DNA, 80 bp, synthetic construct
  misc_feature 1..80: note = Synthetic: >HKU10-cand-5620-5699
  source 1..80: mol_type = other DNA
aattttctgacaataattgctgggttaacactatttgtctacagttacaatttgctaaagccatttttaagaccgagggt

SEQ ID NO: 15706 - DNA, 80 bp, synthetic construct
  misc_feature 1..80: note = Synthetic: >HKU10-cand-5700-5779
  source 1..80: mol_type = other DNA
cttcaagctatgtgggatgagtttctcacaggtagagttgaaaggtttgtgcactggttgtactggtaccaaaatattga

SEQ ID NO: 15707 - DNA, 80 bp, synthetic construct
  misc_feature 1..80: note = Synthetic: >HKU10-cand-5860-5939
  source 1..80: mol_type = other DNA
caaaagctactaattcggtttgttgtaacagcaaacgtactcttactacacctgtggtagaagctagtatccttaagagt

SEQ ID NO: 15708 - DNA, 80 bp, synthetic construct
  misc_feature 1..80: note = Synthetic: >HKU10-cand-5940-6019
  source 1..80: mol_type = other DNA
ggttttgatgatggtgtttgtaaacatggtaatgcttgtgtgtcgcgtgttagtgctgttagaggtactgttattgtgat

SEQ ID NO: 15709 - DNA, 80 bp, synthetic construct
  misc_feature 1..80: note = Synthetic: >HKU10-cand-6020-6099
  source 1..80: mol_type = other DNA
tcaaacaggcaaacctaaagtttacccacgtgctgctctaattgatggtgacacctacactacgtattctggtagcgtag

SEQ ID NO: 15710 - DNA, 80 bp, synthetic construct
  misc_feature 1..80: note = Synthetic: >HKU10-cand-6100-6179
  source 1..80: mol_type = other DNA
aagacggtcattacaccgtttttgaaactaagaatagcagagtgtatgatggtgacaccgtttctactggtaatgacctt

SEQ ID NO: 15711 - DNA, 80 bp, synthetic construct
  misc_feature 1..80: note = Synthetic: >HKU10-cand-6180-6259
  source 1..80: mol_type = other DNA
tctacacatgctgtgtcttctgttgttgttgctaataagttgttcgatgacacaccagtctcaactaaacaaacacccat

SEQ ID NO: 15712 - DNA, 80 bp, synthetic construct
  misc_feature 1..80: note = Synthetic: >HKU10-cand-6260-6339
  source 1..80: mol_type = other DNA
agaggttgttgaaagagaggcttctagtattgttaacacattagacacttctgctgagaagttcttttcttttggtgaca

SEQ ID NO: 15713 - DNA, 80 bp, synthetic construct
  misc_feature 1..80: note = Synthetic: >HKU10-cand-6340-6419
  source 1..80: mol_type = other DNA
ttgtttctcgcaattgtgttacattttttgtgtggttatttagcatgtttagtttagcttttaaggcttttaggactaga

SEQ ID NO: 15714 - DNA, 80 bp, synthetic construct
  misc_feature 1..80: note = Synthetic: >HKU14-cand-13280-13359
  source 1..80: mol_type = other DNA
atatggtggtgcttctgtttgtatttattgccgcgcacgaattgaacatccagatgttgatggattgtgcaagttacgcg

SEQ ID NO: 15715 - DNA, 80 bp, synthetic construct
  misc_feature 1..80: note = Synthetic: >HKU14-cand-13360-13439
  source 1..80: mol_type = other DNA
gtaagtttgttcaagtgcctgtaggtataaaagatcctgtgtcttatatattgacacatgatgtttgtcaagtttgtggc

SEQ ID NO: 15716 - DNA, 80 bp, synthetic construct
  misc_feature 1..80: note = Synthetic: >HKU14-cand-13440-13519
  source 1..80: mol_type = other DNA
ttttggagggatggtagctgctcgtgcgttagtacgggtgcttttgttcagtcaaaagacactaattttttaaacgggtt

SEQ ID NO: 15717 - DNA, 80 bp, synthetic construct
  misc_feature 1..80: note = Synthetic: >HKU14-cand-13520-13599
  source 1..80: mol_type = other DNA
cggggtgcgagtgtagatgcccgtctcgtaccctgtgccaccggtctttctaccgatgttcaattaagggcatttgatat

SEQ ID NO: 15718 - DNA, 80 bp, synthetic construct
  misc_feature 1..80: note = Synthetic: >HKU14-cand-13600-13679
  source 1..80: mol_type = other DNA
ttgtaatgctagtgttgctggcattggtttgcatttgaaagttaattgctgccgttttcagcgtttagatgaaagtggta

SEQ ID NO: 15719 - DNA, 80 bp, synthetic construct
  misc_feature 1..80: note = Synthetic: >HKU14-cand-13680-13759
  source 1..80: mol_type = other DNA
ataaaatggatcgattctttgtagttaaaagaactgatttagttacatataatagagagatggaatgttatgagcgagta

SEQ ID NO: 15720 - DNA, 80 bp, synthetic construct
  misc_feature 1..80: note = Synthetic: >HKU14-cand-13760-13839
  source 1..80: mol_type = other DNA
aaaggttgtagagttgtggcagaacacgatttctttacttttgatgtagagggaagtcgagtgccacatatagttcgcaa

SEQ ID NO: 15721 - DNA, 80 bp, synthetic construct
  misc_feature 1..80: note = Synthetic: >HKU14-cand-13830-13909
  source 1..80: mol_type = other DNA
tagttcgcaaagatcttacaaagtacactatgttggatctttgctatgcattgcgacatttcgatcgcaatgattgctcg

SEQ ID NO: 15722 - DNA, 80 bp, synthetic construct
  misc_feature 1..80: note = Synthetic: >HKU14-cand-13910-13989
  source 1..80: mol_type = other DNA
cttctgtgtgacatactctctatgtatgctggttgtgaacaatcctattttacacaaaaggattggtatgattttgttga

SEQ ID NO: 15723 - DNA, 80 bp, synthetic construct
  misc_feature 1..80: note = Synthetic: >HKU14-cand-13990-14069
  source 1..80: mol_type = other DNA
aaatcctgatataattaatgtttataagaagctaggtcctatttttaatagagccctagttaacactgctgagtttgctg

SEQ ID NO: 15724 - DNA, 80 bp, synthetic construct
  misc_feature 1..80: note = Synthetic: >HKU14-cand-14070-14149
  source 1..80: mol_type = other DNA
atgcacttgtagaggctggcttagtaggtgttttaactcttgataatcaagatttgaatggtatgtggtatgattttggt

SEQ ID NO: 15725 - DNA, 80 bp, synthetic construct
  misc_feature 1..80: note = Synthetic: >HKU14-cand-14150-14229
  source 1..80: mol_type = other DNA
gattatgttattacagcacctggttgtggtgttgcagtagctgattcttattattcttatatgatgcctatgctgaccat

SEQ ID NO: 15726 - DNA, 80 bp, synthetic construct
  misc_feature 1..80: note = Synthetic: >HKU14-cand-14230-14309
  source 1..80: mol_type = other DNA
gtgtcatgcattggattgtgagttatacgtaaataatacttatagacaatttgatcttgtacagtatgactttactgatt

SEQ ID NO: 15727 - DNA, 80 bp, synthetic construct
  misc_feature 1..80: note = Synthetic: >HKU14-cand-14310-14389
  source 1..80: mol_type = other DNA
ataagctcgagttgtttaataagtattttaagcactggagtatgccttatcatcctaacactattgattgtcaggatgat

SEQ ID NO: 15728 - DNA, 80 bp, synthetic construct
  misc_feature 1..80: note = Synthetic: >HKU14-cand-14390-14469
  source 1..80: mol_type = other DNA
aggtgcattatacattgtgctaattttaacatactttttagtatggtgttacctaatacttgttttgggcctcttgttag

SEQ ID NO: 15729 - DNA, 80 bp, synthetic construct
  misc_feature 1..80: note = Synthetic: >HKU14-cand-14470-14549
  source 1..80: mol_type = other DNA
gcaaatttttgtagatggtgttccttttgttgtttcaattgggtaccattataaagaacttggtgttgttatgaatatgg

SEQ ID NO: 15730 - DNA, 80 bp, synthetic construct
  misc_feature 1..80: note = Synthetic: >HKU14-cand-18350-18429
  source 1..80: mol_type = other DNA
cacgctacacgtgacaacattggaactaatttcccattacaattaggattttccactggaatagattttgtagtggaagc

SEQ ID NO: 15731 - DNA, 80 bp, synthetic construct
  misc_feature 1..80: note = Synthetic: >HKU14-cand-18430-18509
  source 1..80: mol_type = other DNA
tactggtttgttcgcagaaagagatggttacagttttagaaaagctgtggccaaagccccacctggtgaacaatttaaac

SEQ ID NO: 15732 - DNA, 80 bp, synthetic construct
  misc_feature 1..80: note = Synthetic: >HKU14-cand-18510-18589
  source 1..80: mol_type = other DNA
acctcatcccgttaatgtcccagggacagcggtgggatgttgttagacctagaatagtacaaatgttttcagatcattta

SEQ ID NO: 15733 - DNA, 80 bp, synthetic construct
  misc_feature 1..80: note = Synthetic: >HKU14-cand-18590-18669
  source 1..80: mol_type = other DNA
gttgatctggctgatagcgttgtacttgttacatgggctgccagctttgagcttacttgtctccgatattttgcgaaaat

SEQ ID NO: 15734 - DNA, 80 bp, synthetic construct
  misc_feature 1..80: note = Synthetic: >HKU14-cand-18670-18749
  source 1..80: mol_type = other DNA
aggtaaggagacatgttgtaatgtgtgcactaatcgtgccacagtctataattctagaactggttactatggctgctggc

SEQ ID NO: 15735 - DNA, 80 bp, synthetic construct
  misc_feature 1..80: note = Synthetic: >HKU14-cand-18750-18829
  source 1..80: mol_type = other DNA
gtcatagtgtttcatgtgattacttgtacaacccacttattgttgatattcaacagtggggatatgtaggttccttgtca

SEQ ID NO: 15736 - DNA, 80 bp, synthetic construct
  misc_feature 1..80: note = Synthetic: >HKU14-cand-18830-18909
  source 1..80: mol_type = other DNA
agtaatcatgatatgtattgtagcatccataaaggagcacatgttgcttcgtcagatgctataatgacacggtgtttggc

SEQ ID NO: 15737 - DNA, 80 bp, synthetic construct
  misc_feature 1..80: note = Synthetic: >HKU14-cand-18910-18989
  source 1..80: mol_type = other DNA
cgtttatgattgtttttgcaataatataaattggaatgtggagtatcccattatttcaaatgagttaagtattaattcct

SEQ ID NO: 15738 - DNA, 80 bp, synthetic construct
  misc_feature 1..80: note = Synthetic: >HKU14-cand-18990-19069
  source 1..80: mol_type = other DNA
cttgtaggacattgcagcgtgttatgcttaaagccgcaatgctttgcaacaggtatagtttgtgctatgatataggcaat

SEQ ID NO: 15739 - DNA, 80 bp, synthetic construct
  misc_feature 1..80: note = Synthetic: >HKU14-cand-19070-19149
  source 1..80: mol_type = other DNA
cctaaggcgattgcatgtatcaaaggctatgattttaagttctatgatgcccaaccgattgttaagtctgttaagacttt

SEQ ID NO: 15740 - DNA, 80 bp, synthetic construct
  misc_feature 1..80: note = Synthetic: >HKU14-cand-19230-19309
  source 1..80: mol_type = other DNA
catcgaatgcagttgtatgtagatttgacactagagtgttgaataatttaaaccttcctggctgtaatggtggaagtttg

SEQ ID NO: 15741 - DNA, 80 bp, synthetic construct
  misc_feature 1..80: note = Synthetic: >HKU14-cand-19310-19389
  source 1..80: mol_type = other DNA
tatgttaataaacatgcattccacactaatcccttttcgagggcagcctttgagtatttgaagcccatgccatttttcta

SEQ ID NO: 15742 - DNA, 80 bp, synthetic construct
  misc_feature 1..80: note = Synthetic: >HKU14-cand-19390-19469
  source 1..80: mol_type = other DNA
ttattcagatacaccttgtgtgtatatggatggcatggataataagcaggttgattatgtacctttgaaagccgccactt

SEQ ID NO: 15743 - DNA, 80 bp, synthetic construct
  misc_feature 1..80: note = Synthetic: >HKU14-cand-19470-19549
  source 1..80: mol_type = other DNA
gcatcacgaagtgcaatttaggtggcgctgtttgtttaaaacatgctgaagagtatcgcgagtatcttgaatgctacaat

SEQ ID NO: 15744 - DNA, 80 bp, synthetic construct
  misc_feature 1..80: note = Synthetic: >HKU14-cand-19550-19629
  source 1..80: mol_type = other DNA
acagcaactacagcaggttttactttttgggtttataagacttttgatttttataatttgtggaatacgttcaccaagct

SEQ ID NO: 15745 - DNA, 80 bp, synthetic construct
  misc_feature 1..80: note = Synthetic: >HKU14-cand-22190-22269
  source 1..80: mol_type = other DNA
gctgagaagaaagatggtttttatgaaaccatagttagccactgggtgggaattcgttatgaacataatccacccactga

SEQ ID NO: 15746 - DNA, 80 bp, synthetic construct
  misc_feature 1..80: note = Synthetic: >HKU14-cand-22270-22349
  source 1..80: mol_type = other DNA
taatctagctatgattatgggttattgttgtttagaagtggtgcgtaatgagctagaagaaggccatcttcccgagaatg

SEQ ID NO: 15747 - DNA, 80 bp, synthetic construct
  misc_feature 1..80: note = Synthetic: >HKU14-cand-22510-22589
  source 1..80: mol_type = other DNA
gtgaaaatgtttttgcttcctagatatattctagttagctgcataattggtagcttaggttttgataaccctcctaccaa

SEQ ID NO: 15748 - DNA, 80 bp, synthetic construct
  misc_feature 1..80: note = Synthetic: >HKU14-cand-22590-22669
  source 1..80: mol_type = other DNA
tgttgtttcgcatgtaaatggagattggtttttatttggtgacagtcgttcagattgtaatcatgttgttaatactaatc

SEQ ID NO: 15749 - DNA, 80 bp, synthetic construct
  misc_feature 1..80: note = Synthetic: >HKU14-cand-22670-22749
  source 1..80: mol_type = other DNA
ctcgtaattattcttatatggaccttaacccagccctatgtgattcaggtaaaatctcttcgaaagctggtaactctttg

SEQ ID NO: 15750 - DNA, 80 bp, synthetic construct
  misc_feature 1..80: note = Synthetic: >HKU14-cand-22750-22829
  source 1..80: mol_type = other DNA
tttaggagtttccacttcacggatttttataattacacaggtgaaggtcaacaaattatattctatgagggtgttaattt

SEQ ID NO: 15751 - DNA, 80 bp, synthetic construct
  misc_feature 1..80: note = Synthetic: >HKU14-cand-22830-22909
  source 1..80: mol_type = other DNA
taatccttatcacgcctttaaatgcaccagttttggtagtaatgatatttggatgcagaataaaggcttgttttatactc

SEQ ID NO: 15752 - DNA, 80 bp, synthetic construct
  misc_feature 1..80: note = Synthetic: >HKU14-cand-22990-23069
  source 1..80: mol_type = other DNA
acagctctttgtaaatctggtagtttagtccttaataatcctgcctatatagctcgtgaagctaatttgggggattatta

SEQ ID NO: 15753 - DNA, 80 bp, synthetic construct
  misc_feature 1..80: note = Synthetic: >HKU14-cand-23070-23149
  source 1..80: mol_type = other DNA
ctataaggttgaagctgactttcatttgtcaggttgtgacgagtatatcgtaccactttgtatttttaatggtaagtttt

SEQ ID NO: 15754 - DNA, 80 bp, synthetic construct
  misc_feature 1..80: note = Synthetic: >HKU14-cand-23230-23309
  source 1..80: mol_type = other DNA
gagactattaccactggttttgattttaattgtcattatttagttttaccctctggtaattatttagccatttcaaatga

SEQ ID NO: 15755 - DNA, 80 bp, synthetic construct
  misc_feature 1..80: note = Synthetic: >HKU14-cand-23310-23389
  source 1..80: mol_type = other DNA
gctattattaactgttcccacgaaagcaatctgtcttagtaagcgtaaggattttacgcctgtacaagtggtagattctc

SEQ ID NO: 15756 - DNA, 80 bp, synthetic construct
  misc_feature 1..80: note = Synthetic: >HKU14-cand-24980-25059
  source 1..80: mol_type = other DNA
tgataagtttgctatacccaatggcaggaaggttgatctacaattgggtaatttaggttatttgcagtcctttaattata

SEQ ID NO: 15757 - DNA, 80 bp, synthetic construct
  misc_feature 1..80: note = Synthetic: >HKU14-cand-25060-25139
  source 1..80: mol_type = other DNA
aaattgacactagtgctacaagttgtcaattgtattataatttacctgctgctaatgtttctgttagcagattaaatcct

SEQ ID NO: 15758 - DNA, 80 bp, synthetic construct
  misc_feature 1..80: note = Synthetic: >HKU14-cand-25140-25219
  source 1..80: mol_type = other DNA
tctacctggaatagaaggtttggttttacagagcaatctgtttttaagcctcagcctgcaggtgtttttactgctcatga

SEQ ID NO: 15759 - DNA, 80 bp, synthetic construct
  misc_feature 1..80: note = Synthetic: >HKU14-cand-25220-25299
  source 1..80: mol_type = other DNA
tgttgtctatgcacaacattgttttaaagctcccaccactttctgtccatgcaaattggatggttcactttgtgttggta

SEQ ID NO: 15760 - DNA, 80 bp, synthetic construct
  misc_feature 1..80: note = Synthetic: >HKU14-cand-25300-25379
  source 1..80: mol_type = other DNA
gtggctctggtgttgatgccggttttaaacatactggtataggcacttgccctgcaggtactaattatttaacatgttat

SEQ ID NO: 15761 - DNA, 80 bp, synthetic construct
  misc_feature 1..80: note = Synthetic: >HKU14-cand-25380-25459
  source 1..80: mol_type = other DNA
aattctgttcaatgtaactgtcaatgtacaccagatcctattttatctaaagctacaggcccctataagtgcccccaaac

SEQ ID NO: 15762 - DNA, 80 bp, synthetic construct
  misc_feature 1..80: note = Synthetic: >HKU14-cand-25460-25539
  source 1..80: mol_type = other DNA
taagtatttagttggtgtaggtgagcattgttcgggtcttgctattaaaagtgattattgtggaggcaatccttgtactt

SEQ ID NO: 15763 - DNA, 80 bp, synthetic construct
  misc_feature 1..80: note = Synthetic: >HKU14-cand-25540-25619
  source 1..80: mol_type = other DNA
gccaaccacaagcttttttgggttggtctgtggattcttgtttacaaggagacaggtgtaatatttttgctaatttaatt

SEQ ID NO: 15764 - DNA, 80 bp, synthetic construct
  misc_feature 1..80: note = Synthetic: >HKU14-cand-25860-25939
  source 1..80: mol_type = other DNA
agcggtcgtgtttcagcggcctttcacgctaattcttccgaaccagcattgctatttcggaatattaaatgcaactacgt

SEQ ID NO: 15765 - DNA, 80 bp, synthetic construct
  misc_feature 1..80: note = Synthetic: >HKU14-cand-25940-26019
  source 1..80: mol_type = other DNA
ttttaataatacttttgcaagacagctgcaacccattaactattttgatagttatctcggttgcgtcgtcaatgctgata

SEQ ID NO: 15766 - DNA, 80 bp, synthetic construct
  misc_feature 1..80: note = Synthetic: >HKU14-cand-29870-29949
  source 1..80: mol_type = other DNA
aggaccgcatgctaaagaccagtatggcaccgacattgacggagtcttctgggtcgctagcaaccaggctgatgttaata

SEQ ID NO: 15767 - DNA, 80 bp, synthetic construct
  misc_feature 1..80: note = Synthetic: >HKU14-cand-29950-30029
  source 1..80: mol_type = other DNA
ccccggctgacattctcgatcgggacccaagtagcgatgaggctattccgactaggtttccgcctggcacggtactccct

SEQ ID NO: 15768 - DNA, 80 bp, synthetic construct
  misc_feature 1..80: note = Synthetic: >HKU14-cand-30030-30109
  source 1..80: mol_type = other DNA
caaggctactatattgaaggctcaggaaggtctgctcctaattccagatctacttctcgcgcatccagcagagcctctag

SEQ ID NO: 15769 - DNA, 80 bp, synthetic construct
  misc_feature 1..80: note = Synthetic: >HKU14-cand-30110-30189
  source 1..80: mol_type = other DNA
tgcaggatcgcgtagtagagccaattcaggtactagaacccctacctctggtgtaacacctgacatggctgatcaaattg

SEQ ID NO: 15770 - DNA, 80 bp, synthetic construct
  misc_feature 1..80: note = Synthetic: >HKU14-cand-30190-30269
  source 1..80: mol_type = other DNA
ctagtcttgttctggcaaagcttggcaaggatgccactaagcctcaacaagtaactaagcagacagccaaagaagtcaga

SEQ ID NO: 15771 - DNA, 80 bp, synthetic construct
  misc_feature 1..80: note = Synthetic: >HKU14-cand-30270-30349
  source 1..80: mol_type = other DNA
cagaaaattttgaacaaaccccgccaaaagaggagccccaataaacaatgcactgttcagcagtgttttgggaaaagagg

SEQ ID NO: 15772 - DNA, 80 bp, synthetic construct
  misc_feature 1..80: note = Synthetic: >HKU14-cand-30350-30429
  source 1..80: mol_type = other DNA
ccccaatcagaattttggtggtggagaaatgttaaaacttggaactagtgatccacagttccccattcttgcagaactcg

SEQ ID NO: 15773 - DNA, 80 bp, synthetic construct
  misc_feature 1..80: note = Synthetic: >HKU14-cand-30430-30509
  source 1..80: mol_type = other DNA
cacccacagcaggtgcgtttttctttggatcaagattagagttggccaaagtgcagaatttgtctgggaatgctgatgaa

SEQ ID NO: 15774 - DNA, 80 bp, synthetic construct
  misc_feature 1..80: note = Synthetic: >HKU14-cand-30510-30589
  source 1..80: mol_type = other DNA
ccccagaaggatgtttatgaattgcgctatagtggcgcgattagatttgatagtacactttcaggttttgaaactataat

SEQ ID NO: 15775 - DNA, 80 bp, synthetic construct
  misc_feature 1..80: note = Synthetic: >HKU14-cand-30590-30669
  source 1..80: mol_type = other DNA
gaaggtgttaaatgagaatttgaatgcctatcagcaacaggatgatgggatgagtcctaaaccacagcgtcagcgtggtc

SEQ ID NO: 15776 - DNA, 80 bp, synthetic construct
  misc_feature 1..80: note = Synthetic: >HKU14-cand-30670-30749
  source 1..80: mol_type = other DNA
aaaggaagggagaaaatgataatataagtgttgcagtgcccaaaagccgcgtgcagcaaaataagagcagagagttgaca

SEQ ID NO: 15777 - DNA, 80 bp, synthetic construct
  misc_feature 1..80: note = Synthetic: >HKU14-cand-30750-30829
  source 1..80: mol_type = other DNA
gcagaggacatcagccttcttaagaagatggatgagccttatactgaagacacctcagaaatataagagaatgaacctta

SEQ ID NO: 15778 - DNA, 80 bp, synthetic construct
  misc_feature 1..80: note = Synthetic: >HKU14-cand-30840-30919
  source 1..80: mol_type = other DNA
tggtggtaacccctcgcaggaaagtcgggataaggcactctctatcagaatggatgtcttgctgctataatagatagagt

SEQ ID NO: 15779 - DNA, 80 bp, synthetic construct
  misc_feature 1..80: note = Synthetic: >HKU14-cand-30920-30999
  source 1..80: mol_type = other DNA
aggttatagcagaccatagattaattagttgaaagttttgtgtggtaatgtatagtgttggagaaagtgaaagacttgcg

SEQ ID NO: 15780 - DNA, 80 bp, synthetic construct
  misc_feature 1..80: note = Synthetic: >HKU14-cand-31000-31079
  source 1..80: mol_type = other DNA
gaagtaattgccgacaagtgcccccgggaggagccagcatgttaagttaccacccagtaattagtaaatgaatgaagtta

SEQ ID NO: 15781 - DNA, 80 bp, synthetic construct
  misc_feature 1..80: note = Synthetic: >HKU15-cand-0-79
  source 1..80: mol_type = other DNA
ggggactaaagataaaaattatagcattagtctataattttatctccctagcttcgctagttctctaccgacaccaatcc

SEQ ID NO: 15782 - DNA, 80 bp, synthetic construct
  misc_feature 1..80: note = Synthetic: >HKU15-cand-2640-2719
  source 1..80: mol_type = other DNA
tattgaggacgatgattacgactgtcctcaagccgacgaagacacagaaggagtaattccccaacagtgggaacttcctg

SEQ ID NO: 15783 - DNA, 80 bp, synthetic construct
  misc_feature 1..80: note = Synthetic: >HKU15-cand-2720-2799
  source 1..80: mol_type = other DNA
atgttgataaatttttactcaagatccaggaacggaagaccagcagcgacgaagtacttagcgtcgacgtctatcctaaa

SEQ ID NO: 15784 - DNA, 80 bp, synthetic construct
  misc_feature 1..80: note = Synthetic: >HKU15-cand-2800-2879
  source 1..80: mol_type = other DNA
ccagagccggtcggcaatgttgggattgacgacagcgcgtcggaaaagaagccaaatggggactcagtaccggatcctga

SEQ ID NO: 15785 - DNA, 80 bp, synthetic construct
  misc_feature 1..80: note = Synthetic: >HKU15-cand-2880-2959
  source 1..80: mol_type = other DNA
ggtccatccaacactagagagtgtggatgttgaacgaccaaccgaaacagcaaaccaggctgttgaagacaaaccttctg

SEQ ID NO: 15786 - DNA, 80 bp, synthetic construct
  misc_feature 1..80: note = Synthetic: >HKU15-cand-2960-3039
  source 1..80: mol_type = other DNA
ataccacctttgtggttgatgaggaacaattacaagaatcaacaccagaacatgaactccgctcctatgaaggggagttt

SEQ ID NO: 15787 - DNA, 80 bp, synthetic construct
  misc_feature 1..80: note = Synthetic: >HKU15-cand-3120-3199
  source 1..80: mol_type = other DNA
gtactttaagtctgaaaaacttgagactattaacgaaggatccacagagtcagttacacaatctgacgattcgtttgacg

SEQ ID NO: 15788 - DNA, 80 bp, synthetic construct
  misc_feature 1..80: note = Synthetic: >HKU15-cand-3200-3279
  source 1..80: mol_type = other DNA
agtcatttgttgatgctgagtctgatgatccacaagatcctgctgtatatgatgatacaacaattataacggacagcact

SEQ ID NO: 15789 - DNA, 80 bp, synthetic construct
  misc_feature 1..80: note = Synthetic: >HKU15-cand-3280-3359
  source 1..80: mol_type = other DNA
gatgtaggcgatgagcctgagacaactctagctaccatcgttaacacacctctgacactcgataataacttgccacctga

SEQ ID NO: 15790 - DNA, 80 bp, synthetic construct
  misc_feature 1..80: note = Synthetic: >HKU15-cand-3360-3439
  source 1..80: mol_type = other DNA
agccattaaacaacccagcccgactaaggttgagttagttgttggtgaattggcgagtattaaatttgacaattctgtcc

SEQ ID NO: 15791 - DNA, 80 bp, synthetic construct
  misc_feature 1..80: note = Synthetic: >HKU15-cand-3440-3519
  source 1..80: mol_type = other DNA
tagtcaaccctgctaatgcgcaattaacaaatggcggtggagctgcccgtgcaattgcaaaattagctggtccaaaatat

SEQ ID NO: 15792 - DNA, 80 bp, synthetic construct
  misc_feature 1..80: note = Synthetic: >HKU15-cand-3520-3599
  source 1..80: mol_type = other DNA
caagagtactgtaatagtgtggctcctatctcaggaccgcttaccacggactcttttgatgccaagaaacttggtgtagc

SEQ ID NO: 15793 - DNA, 80 bp, synthetic construct
  misc_feature 1..80: note = Synthetic: >HKU15-cand-3600-3679
  source 1..80: mol_type = other DNA
ctgcatcttgcatgtagtgccacccaaaggttctgaccctaatgtacaagaactcctgtatcaagcttacaagagtatcc

SEQ ID NO: 15794 - DNA, 80 bp, synthetic construct
  misc_feature 1..80: note = Synthetic: >HKU15-cand-3680-3759
  source 1..80: mol_type = other DNA
ttactgaaccagcacactatgttatacctatactaggtgctggtatctttggatgcaacccagtccactctctggatgcg

SEQ ID NO: 15795 - DNA, 80 bp, synthetic construct
  misc_feature 1..80: note = Synthetic: >HKU15-cand-3760-3839
  source 1..80: mol_type = other DNA
ttcaggaaagcatgtccaagtgacataggtcgtgtcacccttgtcactatgaacaaaaaccatttgcaggtgtgggatgc

SEQ ID NO: 15796 - DNA, 80 bp, synthetic construct
  misc_feature 1..80: note = Synthetic: >HKU15-cand-3840-3919
  source 1..80: mol_type = other DNA
tctcaataggaccattgtacgcaccactactgactatgatcaagttaccaccaaggcccttacaccccagggagtgttag

SEQ ID NO: 15797 - DNA, 80 bp, synthetic construct
  misc_feature 1..80: note = Synthetic: >HKU2-cand-9300-9379
  source 1..80: mol_type = other DNA
attcgatgagactgcataatttttctatttctaagggtaatgtttttcttggtgttgtaggtgctgttatgcaaggtgct

SEQ ID NO: 15798 - DNA, 80 bp, synthetic construct
  misc_feature 1..80: note = Synthetic: >HKU2-cand-9380-9459
  source 1..80: mol_type = other DNA
aatcttgttattactgtgtcacaggctaatgttaacactccatcatatagttttagaactttgaaagcaggtgagtgttt

SEQ ID NO: 15799 - DNA, 80 bp, synthetic construct
  misc_feature 1..80: note = Synthetic: >HKU2-cand-9460-9539
  source 1..80: mol_type = other DNA
taacattttagcttgttatgatggtacacctgctggtgtctatggtgttaatttgagaagcacacatacaattaaaggtt

SEQ ID NO: 15800 - DNA, 80 bp, synthetic construct
  misc_feature 1..80: note = Synthetic: >HKU2-cand-9540-9619
  source 1..80: mol_type = other DNA
catttgttaatggtgcctgtggttcaccaggttttgttatgaatggtcataaagtagagtttgtctacatgcaccagata

SEQ ID NO: 15801 - DNA, 80 bp, synthetic construct
  misc_feature 1..80: note = Synthetic: >HKU2-cand-9620-9699
  source 1..80: mol_type = other DNA
gaacttggtaatgcatcgcatgttggctcggatatgtttggtaacatttatggtgggtttgaagaccaacctagtattca

SEQ ID NO: 15802 - DNA, 80 bp, synthetic construct
  misc_feature 1..80: note = Synthetic: >HKU2-cand-9700-9779
  source 1..80: mol_type = other DNA
gcttgagggtgttgcaacccttattactgaaaatgttatcgcatttctgtatgccgctctaattaatggtgagcgttggt

SEQ ID NO: 15803 - DNA, 80 bp, synthetic construct
  misc_feature 1..80: note = Synthetic: >HKU2-cand-9780-9859
  source 1..80: mol_type = other DNA
ggtgttccaatgaacgttgcactattgatagttttaatgagtgggctcttggtaatggttttactaatttagtgtctggt

SEQ ID NO: 15804 - DNA, 80 bp, synthetic construct
  misc_feature 1..80: note = Synthetic: >HKU2-cand-9860-9939
  source 1..80: mol_type = other DNA
gacgggttctctatgttggctgctaagactggtgttgatgtgtgtcaactcctttcagccatacagagacttgccactgg

SEQ ID NO: 15805 - DNA, 80 bp, synthetic construct
  misc_feature 1..80: note = Synthetic: >HKU2-cand-9940-10019
  source 1..80: mol_type = other DNA
tcttggtggtaaaacgattctaggttatgcttctcttacagatgaatacacacttagtgaggttgttaggcaaatgtatg

SEQ ID NO: 15806 - DNA, 80 bp, synthetic construct
  misc_feature 1..80: note = Synthetic: >HKU2-cand-10020-10099
  source 1..80: mol_type = other DNA
gtgttaacatacagagcactaagactagtagtgctttgaagaacctacttcttatgggtttcttctttctattgttttgg

SEQ ID NO: 15807 - DNA, 80 bp, synthetic construct
  misc_feature 1..80: note = Synthetic: >HKU2-cand-10100-10179
  source 1..80: mol_type = other DNA
tctgaattctttatgtattcaactatactgtggattaatcctggcttgattacaacctttttgggtctttttgtaatgtt

SEQ ID NO: 15808 - DNA, 80 bp, synthetic construct
  misc_feature 1..80: note = Synthetic: >HKU2-cand-10180-10259
  source 1..80: mol_type = other DNA
atctatgctgcttgctagttgtatcaaacataaaatgctttttcttcagttatttttgctcccatctattattatagctg

SEQ ID NO: 15809 - DNA, 80 bp, synthetic construct
  misc_feature 1..80: note = Synthetic: >HKU2-cand-10260-10339
  source 1..80: mol_type = other DNA
cttgctacaattttgcttgggatatggaagtaactagaatgttggctactcagtttgactaccatgtatcatttcttaat

SEQ ID NO: 15810 - DNA, 80 bp, synthetic construct
  misc_feature 1..80: note = Synthetic: >HKU2-cand-10340-10419
  source 1..80: mol_type = other DNA
atggatatacagggtgctattaacattattgtgtgtttcattggtatatctttacatacttatagatttttggacacaca

SEQ ID NO: 15811 - DNA, 80 bp, synthetic construct
  misc_feature 1..80: note = Synthetic: >HKU2-cand-10420-10499
  source 1..80: mol_type = other DNA
attgcgttcttacagcacttatatattatctatgtgcacagttctttacacattctattatggctatgactctttgagcc

SEQ ID NO: 15812 - DNA, 80 bp, synthetic construct
  misc_feature 1..80: note = Synthetic: >HKU2-cand-10500-10579
  source 1..80: mol_type = other DNA
ttgctataatgttactgggttttggctgtagagaatggtatgttggcactgctgcttttagacttgcccagtttatagtg

SEQ ID NO: 15813 - DNA, 80 bp, synthetic construct
  misc_feature 1..80: note = Synthetic: >HKU31-cand-19560-19639
  source 1..80: mol_type = other DNA
ttgtgaagtgcatggtactggtagtatgttagaagacattgattatgtaccacttaagtctgctgtttgtgttacagcat

SEQ ID NO: 15814 - DNA, 80 bp, synthetic construct
  misc_feature 1..80: note = Synthetic: >HKU31-cand-19880-19959
  source 1..80: mol_type = other DNA
aaatcttcaccaagagtggtgtaaatgatgtgtgtgtttttgagaataagaccaaccttcctactaatgtagcatttgag

SEQ ID NO: 15815 - DNA, 80 bp, synthetic construct
  misc_feature 1..80: note = Synthetic: >HKU31-cand-20120-20199
  source 1..80: mol_type = other DNA
atgcagctttgaatatatgctttgatgttcgtgatcaaggttccttagaaaagtttttaacacttccaaatggaatttta

SEQ ID NO: 15816 - DNA, 80 bp, synthetic construct
  misc_feature 1..80: note = Synthetic: >HKU31-cand-20260-20339
  source 1..80: mol_type = other DNA
aatggtgccattatccgtgatagtgaaaccattaaacaacctgttaaattttatatttataaaaagctcaatggtgagtt

SEQ ID NO: 15817 - DNA, 80 bp, synthetic construct
  misc_feature 1..80: note = Synthetic: >HKU31-cand-20340-20419
  source 1..80: mol_type = other DNA
tttgcaatttagtgactccatttatacacaaggacgctcttgtagcgattttgaaccgtgtactcaaatggagaaggatt

SEQ ID NO: 15818 - DNA, 80 bp, synthetic construct
  misc_feature 1..80: note = Synthetic: >HKU31-cand-20420-20499
  source 1..80: mol_type = other DNA
ttttgtctatggaaagcaatgttttcattaagaaatataatctagaaggttatgcttttgaacatgttgtttatggtgat

SEQ ID NO: 15819 - DNA, 80 bp, synthetic construct
  misc_feature 1..80: note = Synthetic: >HKU31-cand-20500-20579
  source 1..80: mol_type = other DNA
ttttcacatacaacattgggtggcttacaccttcttataggtttatataagaagagtttggaaggtcatattattatgga

SEQ ID NO: 15820 - DNA, 80 bp, synthetic construct
  misc_feature 1..80: note = Synthetic: >HKU31-cand-20580-20659
  source 1..80: mol_type = other DNA
agaaatgctaaaagagagtgctactatccataattattttattacagaaaccaacacagcgtcttttaaggcagtgtgtt

SEQ ID NO: 15821 - DNA, 80 bp, synthetic construct
  misc_feature 1..80: note = Synthetic: >HKU31-cand-20660-20739
  source 1..80: mol_type = other DNA
cagttatagatttaactcttgatgactttgtacagattttaaaaagtttagaccttggcgtagtatccaaggtagtcaag

SEQ ID NO: 15822 - DNA, 80 bp, synthetic construct
  misc_feature 1..80: note = Synthetic: >HKU4-cand-26310-26389
  source 1..80: mol_type = other DNA
gctacttcttctcgaaaacggcatagaaaacctaaattgcaatatgccaagagaaggttttcccctgttaatccaaatga

SEQ ID NO: 15823 - DNA, 80 bp, synthetic construct
  misc_feature 1..80: note = Synthetic: >HKU4-cand-26390-26469
  source 1..80: mol_type = other DNA
cttagtgctagttcagcaagaacctactcactgtgttcgtttggtttttcctttaagtaagcgctggatacattttgatg

SEQ ID NO: 15824 - DNA, 80 bp, synthetic construct
  misc_feature 1..80: note = Synthetic: >HKU4-cand-26470-26549
  source 1..80: mol_type = other DNA
gactcgtctattctttagcgcgtcttaatgtgtctatgactgttgattatcatgttaccctagctctcatctatgctcct

SEQ ID NO: 15825 - DNA, 80 bp, synthetic construct
  misc_feature 1..80: note = Synthetic: >HKU4-cand-26550-26629
  source 1..80: mol_type = other DNA
gaggctggtgaatgctttggtaactttttacatctttgtccattgcttaaagattgcttgttggagtttaaaaagctctg

SEQ ID NO: 15826 - DNA, 80 bp, synthetic construct
  misc_feature 1..80: note = Synthetic: >HKU4-cand-26630-26709
  source 1..80: mol_type = other DNA
tgttcttggcaaaacacttaccattttggcaagtgaatggccattttttacagatgttaaaaagaataaagacaatttaa

SEQ ID NO: 15827 - DNA, 80 bp, synthetic construct
  misc_feature 1..80: note = Synthetic: >HKU4-cand-26710-26789
  source 1..80: mol_type = other DNA
ctgttcctaaagctgtagagtggctaaaggaacacggctatgagatatataattctcaattgcctttacatatgtcttta

SEQ ID NO: 15828 - DNA, 80 bp, synthetic construct
  misc_feature 1..80: note = Synthetic: >HKU4-cand-26790-26869
  source 1..80: mol_type = other DNA
gcaaaattacatgacttaccacaagcacagtttgctgaagcggctggtttatgtcattattttgatcctcgagagtttgc

SEQ ID NO: 15829 - DNA, 80 bp, synthetic construct
  misc_feature 1..80: note = Synthetic: >HKU4-cand-26870-26949
  source 1..80: mol_type = other DNA
tttaccttgcgctcttgaagtagttaagataggtggtggtaaagttaatggtagatccattccacttgtccgcttcccaa

SEQ ID NO: 15830 - DNA, 80 bp, synthetic construct
  misc_feature 1..80: note = Synthetic: >HKU4-cand-26950-27029
  source 1..80: mol_type = other DNA
ttaataatgagtttaaattcattccttatctttatcaatgtgtttaggccattaacgaacttatggctttttcagcttct

SEQ ID NO: 15831 - DNA, 80 bp, synthetic construct
  misc_feature 1..80: note = Synthetic: >HKU4-cand-27030-27109
  source 1..80: mol_type = other DNA
ttatttcggactaaaacagtccatactgaagatgcattttgccctcgttcggctattcaggctgaacagcctcctaatat

SEQ ID NO: 15832 - DNA, 80 bp, synthetic construct
  misc_feature 1..80: note = Synthetic: >HKU4-cand-27110-27189
  source 1..80: mol_type = other DNA
catagactgcataccagttgcaggctatgaagctgcattaatcactaatgcacttttcctattagtattatttgtcttta

SEQ ID NO: 15833 - DNA, 80 bp, synthetic construct
  misc_feature 1..80: note = Synthetic: >HKU4-cand-27190-27269
  source 1..80: mol_type = other DNA
acccacttacctgtaagggcaattggattaaagctattttgttttacagcttattgctgtataatatgatattagccata

SEQ ID NO: 15834 - DNA, 80 bp, synthetic construct
  misc_feature 1..80: note = Synthetic: >HKU4-cand-27270-27349
  source 1..80: mol_type = other DNA
tttttggttgttgatacacaacattttgttagtgctttgttgctagcttatgttgttacttttctagtcttgtggactgc

SEQ ID NO: 15835 - DNA, 80 bp, synthetic construct
  misc_feature 1..80: note = Synthetic: >HKU4-cand-27350-27429
  source 1..80: mol_type = other DNA
tgaccgaatacgtctcagttgtgcagtaggaagtgtattaccctttgtcgatatgcggtcttcctatatccgtgttgaca

SEQ ID NO: 15836 - DNA, 80 bp, synthetic construct
  misc_feature 1..80: note = Synthetic: >HKU4-cand-27430-27509
  source 1..80: mol_type = other DNA
acggtaattccagtgttgtagttccaatgaaccacacaaagcactggtttataagaaattttgagcaatcttgtcattgt

SEQ ID NO: 15837 - DNA, 80 bp, synthetic construct
  misc_feature 1..80: note = Synthetic: >HKU4-cand-27510-27589
  source 1..80: mol_type = other DNA
gaaaattgtttttatattcactcttcatcttatgttgagtgtacttttattagtcgcctaaagaaatccatacttgtttc

SEQ ID NO: 15838 - DNA, 80 bp, synthetic construct
  misc_feature 1..80: note = Synthetic: >HKU4-cand-28870-28949
  source 1..80: mol_type = other DNA
aacacggtaaaaacccgcttgccttccctcctggacagggtgtacctcttaatgccaattctacaacagcccagaatgct

SEQ ID NO: 15839 - DNA, 80 bp, synthetic construct
  misc_feature 1..80: note = Synthetic: >HKU4-cand-28950-29029
  source 1..80: mol_type = other DNA
ggatactggcggagacaagaccggaaaatcaacaccggtaatggtgttaaacaattggctcccagatggttcttctacta

SEQ ID NO: 15840 - DNA, 80 bp, synthetic construct
  misc_feature 1..80: note = Synthetic: >HKU4-cand-29030-29109
  source 1..80: mol_type = other DNA
cactgggactggaccagaggctaatctaccttttagatcagtcaaggatggcatcgtctgggtttatgaagaaggtgcca

SEQ ID NO: 15841 - DNA, 80 bp, synthetic construct
  misc_feature 1..80: note = Synthetic: >HKU4-cand-29110-29189
  source 1..80: mol_type = other DNA
ctgatgctccttcagtctttgggactcgcaacccagcaaatgatgctgctatcgtttgccagtttgcgccaggtactctc

SEQ ID NO: 15842 - DNA, 80 bp, synthetic construct
  misc_feature 1..80: note = Synthetic: >HKU4-cand-29190-29269
  source 1..80: mol_type = other DNA
attcctaaaaacttccacattgaagggactgggggtaatagtcagtcatcttcaagagcatcctccaacagtaggaactc

SEQ ID NO: 15843 - DNA, 80 bp, synthetic construct
  misc_feature 1..80: note = Synthetic: >HKU4-cand-29270-29349
  source 1..80: mol_type = other DNA
ttctagatccaattccagaggaggacgaagcacttctaactccagagggacttccccagtttcacatggagtcggaagtg

SEQ ID NO: 15844 - DNA, 80 bp, synthetic construct
  misc_feature 1..80: note = Synthetic: >HKU4-cand-29350-29429
  source 1..80: mol_type = other DNA
cagaatccttagctgctctgccattgcttctagacttgcagaagcgtttggctgatcttgagtctggaaagtcaaagcag

SEQ ID NO: 15845 - DNA, 80 bp, synthetic construct
  misc_feature 1..80: note = Synthetic: >HKU4-cand-29430-29509
  source 1..80: mol_type = other DNA
cctaaagttgtcactaaaaaggacgctgccgctgcaaaaaataaaatgcgccataagcgtgttgccaccaaaggtttcaa

SEQ ID NO: 15846 - DNA, 80 bp, synthetic construct
  misc_feature 1..80: note = Synthetic: >HKU4-cand-29510-29589
  source 1..80: mol_type = other DNA
tgtaactcaggcttttggtcttcgtggaccaggcccattgcagggaaattttggtgacatgaactacaacaagtttggta

SEQ ID NO: 15847 - DNA, 80 bp, synthetic construct
  misc_feature 1..80: note = Synthetic: >HKU4-cand-29590-29669
  source 1..80: mol_type = other DNA
ctgaggaccctcgttggcctcagatggctgaacttgctccttcagcttcagctttcatgagtatgtctcaatttaagctt

SEQ ID NO: 15848 - DNA, 80 bp, synthetic construct
  misc_feature 1..80: note = Synthetic: >HKU4-cand-29670-29749
  source 1..80: mol_type = other DNA
acccatcaaagcaatgatgacaaaggtgatcctatttactttttgtcatattcaggagcaattaaactagaccctaagaa

SEQ ID NO: 15849 - DNA, 80 bp, synthetic construct
  misc_feature 1..80: note = Synthetic: >HKU4-cand-29750-29829
  source 1..80: mol_type = other DNA
tcccaactacaaaaagtggctggagcttcttgagtcaaatattgatgcttacaaaactttccctaagaaagagcgtaagc

SEQ ID NO: 15850 - DNA, 80 bp, synthetic construct
  misc_feature 1..80: note = Synthetic: >HKU4-cand-29830-29909
  source 1..80: mol_type = other DNA
ctaaaactacagaagatggagctgttgttgcttcttcttcagctagtcaaatggaggatgttgatgctaaacctcagcga

SEQ ID NO: 15851 - DNA, 80 bp, synthetic construct
  misc_feature 1..80: note = Synthetic: >HKU4-cand-29910-29989
  source 1..80: mol_type = other DNA
aagcctaaaagccgagtagcaggtagcattaccatgcgttctggaagctcaccagctcttcaggacgttaccttcgattc

SEQ ID NO: 15852 - DNA, 80 bp, synthetic construct
  misc_feature 1..80: note = Synthetic: >HKU4-cand-29990-30069
  source 1..80: mol_type = other DNA
agaggcttgaatgccaatgaagagtaacaagagttgaggcaactgctagcgttcaggtaacccctttacgtgatgcattt

SEQ ID NO: 15853 - DNA, 80 bp, synthetic construct
  misc_feature 1..80: note = Synthetic: >HKU4-cand-30070-30149
  source 1..80: mol_type = other DNA
gtccactcttgcacagaatggaatcatgttaaacttacagtgcaagaaagtaagttaacccatttaattgatagctatgc

SEQ ID NO: 15854 - DNA, 80 bp, synthetic construct
  misc_feature 1..80: note = Synthetic: >HKU5-cand-2400-2479
  source 1..80: mol_type = other DNA
gccatgcaactgcttcacaccacggtttcttgggcaggttccaagttgccatcagttgtgtacaatagaagagattccct

SEQ ID NO: 15855 - DNA, 80 bp, synthetic construct
  misc_feature 1..80: note = Synthetic: >HKU5-cand-2480-2559
  source 1..80: mol_type = other DNA
tgtatttccaagtggcacatactattgtgtctccactcaaggcaggtctctgcaggatcaatttgatctcgtaattcctg

SEQ ID NO: 15856 - DNA, 80 bp, synthetic construct
  misc_feature 1..80: note = Synthetic: >HKU5-cand-2720-2799
  source 1..80: mol_type = other DNA
tagtaataaaatctttgtgcgcagtgtcgaggacagtgaaacagtcttctacccactctgcacagatggaaagatcgtgc

SEQ ID NO: 15857 - DNA, 80 bp, synthetic construct
  misc_feature 1..80: note = Synthetic: >HKU5-cand-3040-3119
  source 1..80: mol_type = other DNA
gtggttacaacattgacggatttgatctggaggatttcgctgatacaccttgctatgtctacaatgctgaaggagactta

SEQ ID NO: 15858 - DNA, 80 bp, synthetic construct
  misc_feature 1..80: note = Synthetic: >HKU5-cand-3120-3199
  source 1..80: mol_type = other DNA
gcttggagctcaaccatgacattctcagtcaaccctgttgaggaagttgaagaggagtgtgatgatgattacgtagagga

SEQ ID NO: 15859 - DNA, 80 bp, synthetic construct
  misc_feature 1..80: note = Synthetic: >HKU5-cand-3200-3279
  source 1..80: mol_type = other DNA
tgaatacctctctgaagaaatgcttgtcgaggaagatgagaattcctgggctgcagctgttgaagccgtcattccaatgg

SEQ ID NO: 15860 - DNA, 80 bp, synthetic construct
  misc_feature 1..80: note = Synthetic: >HKU5-cand-3280-3359
  source 1..80: mol_type = other DNA
aagacgtccaattagacacccttgtagctgaaattgatgtttcagagccagctgatgatgtcgctgaacaagcctctact

SEQ ID NO: 15861 - DNA, 80 bp, synthetic construct
  misc_feature 1..80: note = Synthetic: >HKU5-cand-3600-3679
  source 1..80: mol_type = other DNA
aatgctactgtaataagtgacgatgttcacacagccactcattctaaaggactagttgcggttcccgaagttgttccaga

SEQ ID NO: 15862 - DNA, 80 bp, synthetic construct
  misc_feature 1..80: note = Synthetic: >HKU5-cand-7520-7599
  source 1..80: mol_type = other DNA
aaactggcgttcatacaattacctggtttctggatatttcttttgcgttacacacatccccttgttgggtcttgtgcgta

SEQ ID NO: 15863 - DNA, 80 bp, synthetic construct
  misc_feature 1..80: note = Synthetic: >HKU5-cand-7600-7679
  source 1..80: mol_type = other DNA
tctacaatttcctcgcatgcctctggttccttcgccgcttctacaatcatgttatcaatggttgcaaggacactgcatgc

SEQ ID NO: 15864 - DNA, 80 bp, synthetic construct
  misc_feature 1..80: note = Synthetic: >HKU5-cand-8080-8159
  source 1..80: mol_type = other DNA
actttctaatctatgactcgagtgatcgtggccaggaaaatttagccagatcagcttgcgtttattattcccaggttctc

SEQ ID NO: 15865 - DNA, 80 bp, synthetic construct
  misc_feature 1..80: note = Synthetic: >HKU5-cand-8160-8239
  source 1..80: mol_type = other DNA
tccaagccaatgttgcttgtagattcgaacatggtcaccactgttggcgacagtcgagagattgccagcaaaatgctcga

SEQ ID NO: 15866 - DNA, 80 bp, synthetic construct
  misc_feature 1..80: note = Synthetic: >HKU5-cand-8400-8479
  source 1..80: mol_type = other DNA
gatgtagaaacctcttccattgttgacgctctgcagtatgctcacaagcacgatatgcagttgactacagaggggtttaa

SEQ ID NO: 15867 - DNA, 80 bp, synthetic construct
  misc_feature 1..80: note = Synthetic: >HKU5-cand-8480-8559
  source 1..80: mol_type = other DNA
taattacgttcctagctatattaagcctgacagcgtcgcgacagctgatctgggttgtttaattgaccttaacgctgctt

SEQ ID NO: 15868 - DNA, 80 bp, synthetic construct
  misc_feature 1..80: note = Synthetic: >HKU5-cand-8560-8639
  source 1..80: mol_type = other DNA
ctgttaaccagactagcatccgcaatgcaaatggcgcatgcatctggaatagcagcgactatatgaaactgtctgatagc

SEQ ID NO: 15869 - DNA, 80 bp, synthetic construct
  misc_feature 1..80: note = Synthetic: >HKU5-cand-12640-12719
  source 1..80: mol_type = other DNA
ttaatggtgtcatctcaaacgctaggaatggctgtgtgccccttagtgttgtgccactctgtgcttctaacaaattaaga

SEQ ID NO: 15870 - DNA, 80 bp, synthetic construct
  misc_feature 1..80: note = Synthetic: >HKU5-cand-12720-12799
  source 1..80: mol_type = other DNA
gtagtgatacctgatatcactatttggaacaaagttgtcacatggccaagcttgtcttatgccggtgcactttgggacat

SEQ ID NO: 15871 - DNA, 80 bp, synthetic construct
  misc_feature 1..80: note = Synthetic: >HKU5-cand-12800-12879
  source 1..80: mol_type = other DNA
ttctcttataaacaatgtggacggtgaagttgttaagtcttcagatgtcacagagacaaatgaatccttgacatggccac

SEQ ID NO: 15872 - DNA, 80 bp, synthetic construct
  misc_feature 1..80: note = Synthetic: >HKU5-cand-13200-13279
  source 1..80: mol_type = other DNA
aacaatttacatcgtggacagttgctaggccacattgccgctactgttcgtttacaagcaggttctaatacagaatttgc

SEQ ID NO: 15873 - DNA, 80 bp, synthetic construct
  misc_feature 1..80: note = Synthetic: >HKU5-cand-13280-13359
  source 1..80: mol_type = other DNA
tatcaactcgtcagtgctgtcggctgtcaccttcagcgttgatcctggtaaagcatacttagactttgtgaacgcaggtg

SEQ ID NO: 15874 - DNA, 80 bp, synthetic construct
  misc_feature 1..80: note = Synthetic: >HKU5-cand-13440-13519
  source 1..80: mol_type = other DNA
aatgcagatcaagatacctatggtggtgcatcagtgtgtctatattgcagagcgcatatagagcacccagatgtcacagg

SEQ ID NO: 15875 - DNA, 80 bp, synthetic construct
  misc_feature 1..80: note = Synthetic: >HKU5-cand-13840-13919
  source 1..80: mol_type = other DNA
caggtttgtagaagtcgatgacgaaggtcatagacttgactccttctttgtcgttaagcgccatacaatggaaaattatg

SEQ ID NO: 15876 - DNA, 80 bp, synthetic construct
  misc_feature 1..80: note = Synthetic: >HKU9-cand-1450-1529
  source 1..80: mol_type = other DNA
ctctggagccgtaggttcgtgtgatgtcactactatgaacaaggagatcatggcctacattattgaaggctttaaaattg

SEQ ID NO: 15877 - DNA, 80 bp, synthetic construct
  misc_feature 1..80: note = Synthetic: >HKU9-cand-1530-1609
  source 1..80: mol_type = other DNA
atgaagacacactggataaaccatcctgtgctacttttattgctaatatgcagtgtgatgagaagactccagttgtgcac

SEQ ID NO: 15878 - DNA, 80 bp, synthetic construct
  misc_feature 1..80: note = Synthetic: >HKU9-cand-1610-1689
  source 1..80: mol_type = other DNA
actgtagagtctatgaaacagctttgcctggacaacaaggttgttttaggcgaccatcctttgccagatgatgaatttca

SEQ ID NO: 15879 - DNA, 80 bp, synthetic construct
  misc_feature 1..80: note = Synthetic: >HKU9-cand-1690-1769
  source 1..80: mol_type = other DNA
tcctgttattgttggtttgaattactacactcagcgtgcttgctggtatgctgccctgacctccaacacctttgctgcaa

SEQ ID NO: 15880 - DNA, 80 bp, synthetic construct
  misc_feature 1..80: note = Synthetic: >HKU9-cand-1770-1849
  source 1..80: mol_type = other DNA
tgcgggactatgtccgcacggaagaggagagcctgcgtgatttttgtggcagggcgtttacacctgtaaatgcttgtgtg

SEQ ID NO: 15881 - DNA, 80 bp, synthetic construct
  misc_feature 1..80: note = Synthetic: >HKU9-cand-1850-1929
  source 1..80: mol_type = other DNA
cagatggcataccagacgggtagtgtcacattgttgtctgcatatcatgttttggacactgccataaccaaaactaagga

SEQ ID NO: 15882 - DNA, 80 bp, synthetic construct
  misc_feature 1..80: note = Synthetic: >HKU9-cand-1930-2009
  source 1..80: mol_type = other DNA
tgcatttggtggtgctgctgctgtggttgttgacatgctcaaacctgttttggattgggtgctaaacaagatgtccctgg

SEQ ID NO: 15883 - DNA, 80 bp, synthetic construct
  misc_feature 1..80: note = Synthetic: >HKU9-cand-2010-2089
  source 1..80: mol_type = other DNA
ctaagggtgtatggcttcgctatgctgaggctattttggcactgtttaaggcgcaatttacctttgttaaaggtaaattt

SEQ ID NO: 15884 - DNA, 80 bp, synthetic construct
  misc_feature 1..80: note = Synthetic: >HKU9-cand-2090-2169
  source 1..80: mol_type = other DNA
cagtttgtgcgtgatgctttgaataagtcgtgcggtgctttacgtgatatgctgacagttgttttgagtaagctacttac

SEQ ID NO: 15885 - DNA, 80 bp, synthetic construct
  misc_feature 1..80: note = Synthetic: >HKU9-cand-2170-2249
  source 1..80: mol_type = other DNA
atctgcaaagtgggctggttgtaaggtggaagccttgtacactggcacttatcactacttttccaagtatggtgtgctca

SEQ ID NO: 15886 - DNA, 80 bp, synthetic construct
  misc_feature 1..80: note = Synthetic: >HKU9-cand-2250-2329
  source 1..80: mol_type = other DNA
ctgaggtgcaggtttgtgctaagggactgggcgttttattgacacctagacagcagaagatggaggtggaggtgttagaa

SEQ ID NO: 15887 - DNA, 80 bp, synthetic construct
  misc_feature 1..80: note = Synthetic: >HKU9-cand-2330-2409
  source 1..80: mol_type = other DNA
ggtaagtctgatgcccctgtggaccttacaaactttgagcttgaggagtcaaaaggtacactagaggaagtttttggtta

SEQ ID NO: 15888 - DNA, 80 bp, synthetic construct
  misc_feature 1..80: note = Synthetic: >HKU9-cand-2410-2489
  source 1..80: mol_type = other DNA
ttcagatgttgaactggttaagggtagtttggtaactatggccagcaaagtgtttgtgcgcacggaggatggtgtgttct

SEQ ID NO: 15889 - DNA, 80 bp, synthetic construct
  misc_feature 1..80: note = Synthetic: >HKU9-cand-2490-2569
  source 1..80: mol_type = other DNA
atcgctatgttaaatctggtggtgttttatttaaggccttcagactacgtggcggtggaccacctaaagttacctttggt

SEQ ID NO: 15890 - DNA, 80 bp, synthetic construct
  misc_feature 1..80: note = Synthetic: >HKU9-cand-2570-2649
  source 1..80: mol_type = other DNA
gatgaggaggttcgcaccatccctaatactgtgactgtaaattttagttatgacgtttgtgaaggactcaatgaaatcct

SEQ ID NO: 15891 - DNA, 80 bp, synthetic construct
  misc_feature 1..80: note = Synthetic: >HKU9-cand-2650-2729
  source 1..80: mol_type = other DNA
tggcaaagtcatggcgccttttcaagttgaagagggaactagtcttgatgacttagcttgtgtagttcaacaggcagttt

SEQ ID NO: 15892 - DNA, 80 bp, synthetic construct
  misc_feature 1..80: note = Synthetic: >MERS-cand-21050-21129
  source 1..80: mol_type = other DNA
ttacctgtgtaacctcattaataataatcttgctcttggtgggtctgttgctattaaaataacagaacactcttggagcg

SEQ ID NO: 15893 - DNA, 80 bp, synthetic construct
  misc_feature 1..80: note = Synthetic: >MERS-cand-21130-21209
  source 1..80: mol_type = other DNA
ttgaactttatgaacttatgggaaaatttgcttggtggactgttttctgcaccaatgcaaatgcatcctcatctgaagga

SEQ ID NO: 15894 - DNA, 80 bp, synthetic construct
  misc_feature 1..80: note = Synthetic: >MERS-cand-21210-21289
  source 1..80: mol_type = other DNA
ttcctcttaggtattaattacttgggtactattaaagaaaatatagatggtggtgctatgcacgccaactatatattttg

SEQ ID NO: 15895 - DNA, 80 bp, synthetic construct
  misc_feature 1..80: note = Synthetic: >MERS-cand-21290-21369
  source 1..80: mol_type = other DNA
gagaaattccactcctatgaatctgagtacttactcactttttgatttatccaagtttcaattaaaattaaaaggaacac

SEQ ID NO: 15896 - DNA, 80 bp, synthetic construct
  misc_feature 1..80: note = Synthetic: >MERS-cand-21370-21449
  source 1..80: mol_type = other DNA
cagttcttcaattaaaggagagtcaaattaacgaactcgtaatatctctcctgtcgcagggtaagttacttatccgtgac

SEQ ID NO: 15897 - DNA, 80 bp, synthetic construct
  misc_feature 1..80: note = Synthetic: >MERS-cand-21450-21529
  source 1..80: mol_type = other DNA
aatgatacactcagtgtttctactgatgttcttgttaacacctacagaaagttacgttgatgtagggccagattctgtta

SEQ ID NO: 15898 - DNA, 80 bp, synthetic construct
  misc_feature 1..80: note = Synthetic: >MERS-cand-21530-21609
  source 1..80: mol_type = other DNA
agtctgcttgtattgaggttgatatacaacagactttctttgataaaacttggcctaggccaattgatgtttctaaggct

SEQ ID NO: 15899 - DNA, 80 bp, synthetic construct
  misc_feature 1..80: note = Synthetic: >MERS-cand-21610-21689
  source 1..80: mol_type = other DNA
gacggtattatataccctcaaggccgtacatattctaacataactatcacttatcaaggtctttttccctatcagggaga

SEQ ID NO: 15900 - DNA, 80 bp, synthetic construct
  misc_feature 1..80: note = Synthetic: >MERS-cand-21690-21769
  source 1..80: mol_type = other DNA
ccatggtgatatgtatgtttactctgcaggacatgctacaggcacaactccacaaaagttgtttgtagctaactattctc

SEQ ID NO: 15901 - DNA, 80 bp, synthetic construct
  misc_feature 1..80: note = Synthetic: >MERS-cand-21770-21849
  source 1..80: mol_type = other DNA
aggacgtcaaacagtttgctaatgggtttgtcgtccgtataggagcagctgccaattccactggcactgttattattagc

SEQ ID NO: 15902 - DNA, 80 bp, synthetic construct
  misc_feature 1..80: note = Synthetic: >MERS-cand-21850-21929
  source 1..80: mol_type = other DNA
ccatctaccagcgctactatacgaaaaatttaccctgcttttatgctgggttcttcagttggtaatttctcagatggtaa

SEQ ID NO: 15903 - DNA, 80 bp, synthetic construct
  misc_feature 1..80: note = Synthetic: >MERS-cand-21930-22009
  source 1..80: mol_type = other DNA
aatgggccgcttcttcaatcatactctagttcttttgcccgatggatgtggcactttacttagagctttttattgtattc

SEQ ID NO: 15904 - DNA, 80 bp, synthetic construct
  misc_feature 1..80: note = Synthetic: >MERS-cand-22010-22089
  source 1..80: mol_type = other DNA
tagagcctcgctctggaaatcattgtcctgctggcaattcctatacttcttttgccacttatcacactcctgcaacagat

SEQ ID NO: 15905 - DNA, 80 bp, synthetic construct
  misc_feature 1..80: note = Synthetic: >MERS-cand-22090-22169
  source 1..80: mol_type = other DNA
tgttctgatggcaattacaatcgtaatgccagtctgaactcttttaaggagtattttaatttacgtaactgcacctttat

SEQ ID NO: 15906 - DNA, 80 bp, synthetic construct
  misc_feature 1..80: note = Synthetic: >MERS-cand-22170-22249
  source 1..80: mol_type = other DNA
gtacacttataacattaccgaagatgagattttagagtggtttggcattacacaaactgctcaaggtgttcacctcttct

SEQ ID NO: 15907 - DNA, 80 bp, synthetic construct
  misc_feature 1..80: note = Synthetic: >MERS-cand-22250-22329
  source 1..80: mol_type = other DNA
catctcggtatgttgatttgtacggcggcaatatgtttcaatttgccaccttgcctgtttatgatactattaagtattat

SEQ ID NO: 15908 - DNA, 80 bp, synthetic construct
  misc_feature 1..80: note = Synthetic: >NL63-cand-5440-5519
  source 1..80: mol_type = other DNA
ttataactatgtcttcaaagggtcaaaagggtgatgctgaagaggcattatctaaattgtcagagtatttgattagtgat

SEQ ID NO: 15909 - DNA, 80 bp, synthetic construct
  misc_feature 1..80: note = Synthetic: >NL63-cand-5520-5599
  source 1..80: mol_type = other DNA
tctattgttactcttgaacaatattcaacttgtgacatttgtaaaagtactgtagttgaagttaaaagtgctgttgtttg

SEQ ID NO: 15910 - DNA, 80 bp, synthetic construct
  misc_feature 1..80: note = Synthetic: >NL63-cand-5600-5679
  source 1..80: mol_type = other DNA
tgctagtgtgcttaaagatggttgtgatgttggtttttgtccacacagacataaattgcgttcacgtgttaagtttgtta

SEQ ID NO: 15911 - DNA, 80 bp, synthetic construct
  misc_feature 1..80: note = Synthetic: >NL63-cand-5680-5759
  source 1..80: mol_type = other DNA
atggacgtgttgttattaccaatgttggtgaacctataatttcacaaccttctaagttgcttaatggtattgcttataca

SEQ ID NO: 15912 - DNA, 80 bp, synthetic construct
  misc_feature 1..80: note = Synthetic: >NL63-cand-5760-5839
  source 1..80: mol_type = other DNA
acattttcaggttcttttgataacggtcactatgtagtttatgatgctgctaataatgctgtctatgatggtgctcgttt

SEQ ID NO: 15913 - DNA, 80 bp, synthetic construct
  misc_feature 1..80: note = Synthetic: >NL63-cand-5840-5919
  source 1..80: mol_type = other DNA
atttgcttcagatttgtctactttagctgttacagctattgttgtagtaggtggttgtgtaacatctaatgtttcaccaa

SEQ ID NO: 15914 - DNA, 80 bp, synthetic construct
  misc_feature 1..80: note = Synthetic: >NL63-cand-5920-5999
  source 1..80: mol_type = other DNA
ttgttagtgagaaaatttctgttatggataaacttgatactggtgcacaaaaatttttccagtttggtgattttgttatg

SEQ ID NO: 15915 - DNA, 80 bp, synthetic construct
  misc_feature 1..80: note = Synthetic: >NL63-cand-6000-6079
  source 1..80: mol_type = other DNA
aataacattgttctgtttttaacttggttgcttagtatgtttagtcttttacgtacttctattatgaagcatgatattaa

SEQ ID NO: 15916 - DNA, 80 bp, synthetic construct
  misc_feature 1..80: note = Synthetic: >NL63-cand-6080-6159
  source 1..80: mol_type = other DNA
agttattgccaaggctcctaaacgtacaggtgttattttgacacgtagttttaagtataacattaaatctgctttgtttg

SEQ ID NO: 15917 - DNA, 80 bp, synthetic construct
  misc_feature 1..80: note = Synthetic: >NL63-cand-6160-6239
  source 1..80: mol_type = other DNA
ttgtaaaacagaagtggtgtgttattgttactttgtttaagttcttattgttattatatgctatttatgcacttgttttt

SEQ ID NO: 15918 - DNA, 80 bp, synthetic construct
  misc_feature 1..80: note = Synthetic: >NL63-cand-6240-6319
  source 1..80: mol_type = other DNA
atgattgtgcaatttagtccttttaatagtcttttatgtggtgacattgtaagtggttatgaaaaatccacttttaataa

SEQ ID NO: 15919 - DNA, 80 bp, synthetic construct
  misc_feature 1..80: note = Synthetic: >NL63-cand-6320-6399
  source 1..80: mol_type = other DNA
ggatatttattgtggtaattctatggtttgtaagatgtgtttgtttagttatcaagagtttaatgatttggatcatacta

SEQ ID NO: 15920 - DNA, 80 bp, synthetic construct
  misc_feature 1..80: note = Synthetic: >NL63-cand-6400-6479
  source 1..80: mol_type = other DNA
gtcttgtttggaagcacattcgtgatcctatattaatcagtttacaaccatttgttatacttgttattttgttaattttt

SEQ ID NO: 15921 - DNA, 80 bp, synthetic construct
  misc_feature 1..80: note = Synthetic: >NL63-cand-6480-6559
  source 1..80: mol_type = other DNA
ggtaatatgtatttgcgttttggacttttatattttgttgcacaatttattagtacttttggttctttcttaggctttca

SEQ ID NO: 15922 - DNA, 80 bp, synthetic construct
  misc_feature 1..80: note = Synthetic: >NL63-cand-6560-6639
  source 1..80: mol_type = other DNA
tcagaaacagtggtttttacattttgtgccgttcgatgttttatgtaatgagtttttagctacatttattgtctgcaaaa

SEQ ID NO: 15923 - DNA, 80 bp, synthetic construct
  misc_feature 1..80: note = Synthetic: >NL63-cand-6640-6719
  source 1..80: mol_type = other DNA
ttgttttatttgttagacatattattgttggctgtaataatgctgactgtgtagcttgttctaaaagtgctagacttaaa

SEQ ID NO: 15924 - DNA, 80 bp, synthetic construct
  misc_feature 1..80: note = Synthetic: >NL63-cand-9270-9349
  source 1..80: mol_type = other DNA
agtactatgcgtttgcataatttttcagtgtctcataatggtgtcttcttgggagttgttggtgttacaatgcatggttc

SEQ ID NO: 15925 - DNA, 80 bp, synthetic construct
  misc_feature 1..80: note = Synthetic: >NL63-cand-9350-9429
  source 1..80: mol_type = other DNA
tgtgttgcgtattaaggtttcacaatctaatgtacatacacctaaacatgtttttaaaacgttgaaacctggtgattctt

SEQ ID NO: 15926 - DNA, 80 bp, synthetic construct
  misc_feature 1..80: note = Synthetic: >NL63-cand-9430-9509
  source 1..80: mol_type = other DNA
ttaatattttagcatgttatgaaggtattgcatctggtgtttttggtgttaatttacgtacaaactttactattaaaggt

SEQ ID NO: 15927 - DNA, 80 bp, synthetic construct
  misc_feature 1..80: note = Synthetic: >NL63-cand-9510-9589
  source 1..80: mol_type = other DNA
tcttttataaatggagcttgtggttctcctggttataatgttagaaatgatggtactgttgagttttgttatttacacca

SEQ ID NO: 15928 - DNA, 80 bp, synthetic construct
  misc_feature 1..80: note = Synthetic: >NL63-cand-9590-9669
  source 1..80: mol_type = other DNA
aattgagttaggtagtggtgctcatgttggttctgattttactggtagtgtttatggtaattttgatgaccaacctagtt

SEQ ID NO: 15929 - DNA, 80 bp, synthetic construct
  misc_feature 1..80: note = Synthetic: >NL63-cand-9670-9749
  source 1..80: mol_type = other DNA
tgcaagttgagagtgccaaccttatgctatcagataatgttgttgcctttttgtatgctgctttgttgaatggttgtagg

SEQ ID NO: 15930 - DNA, 80 bp, synthetic construct
  misc_feature 1..80: note = Synthetic: >NL63-cand-9750-9829
  source 1..80: mol_type = other DNA
tggtggttgcgttcaactagagttaatgttgatggttttaatgaatgggctatggctaatggttatacaagtgtttctag

SEQ ID NO: 15931 - DNA, 80 bp, synthetic construct
  misc_feature 1..80: note = Synthetic: >NL63-cand-9830-9909
  source 1..80: mol_type = other DNA
tgttgagtgctattctattttggcagcaaaaactggtgttagtgttgaacaattgttagcttccattcaacatcttcatg

SEQ ID NO: 15932 - DNA, 80 bp, synthetic construct
  misc_feature 1..80: note = Synthetic: >NL63-cand-9910-9989
  source 1..80: mol_type = other DNA
aaggttttggtggtaaaaacatacttggttattctagtttatgtgatgagttcacactagctgaagttgtgaagcagatg

SEQ ID NO: 15933 - DNA, 80 bp, synthetic construct
  misc_feature 1..80: note = Synthetic: >NL63-cand-9990-10069
  source 1..80: mol_type = other DNA
tatggtgttaacttgcaaagtggtaaggttatttttggtttaaaaacaatgtttttatttagcgttttcttcacaatgtt

SEQ ID NO: 15934 - DNA, 80 bp, synthetic construct
  misc_feature 1..80: note = Synthetic: >NL63-cand-10070-10149
  source 1..80: mol_type = other DNA
ttgggcagaactctttatttatacaaacactatatggataaaccctgtgatacttacacctatattttgtctacttttgt

SEQ ID NO: 15935 - DNA, 80 bp, synthetic construct
  misc_feature 1..80: note = Synthetic: >NL63-cand-10150-10229
  source 1..80: mol_type = other DNA
ttttgtcattagttttaactatgtttcttaaacataagtttttgtttttgcaagtatttttattacctactgttattgca

SEQ ID NO: 15936 - DNA, 80 bp, synthetic construct
  misc_feature 1..80: note = Synthetic: >NL63-cand-10230-10309
  source 1..80: mol_type = other DNA
actgctttatataattgtgttttggattattacatagtaaaatttttggctgaccattttaactataatgtttcagtatt

SEQ ID NO: 15937 - DNA, 80 bp, synthetic construct
  misc_feature 1..80: note = Synthetic: >NL63-cand-10310-10389
  source 1..80: mol_type = other DNA
acaaatggatgttcagggtttagttaatgttttggtctgtttatttgttgtatttttacacacatggcgcttttctaaag

SEQ ID NO: 15938 - DNA, 80 bp, synthetic construct
  misc_feature 1..80: note = Synthetic: >NL63-cand-10390-10469
  source 1..80: mol_type = other DNA
aacgttttacacattggtttacatatgtgtgttctcttatagcagttgcttacacttatttttatagtggtgactttttg

SEQ ID NO: 15939 - DNA, 80 bp, synthetic construct
  misc_feature 1..80: note = Synthetic: >NL63-cand-10470-10549
  source 1..80: mol_type = other DNA
agtttgcttgttatgtttttatgtgctatatctagtgattggtacattggtgccattgtttttaggttgtcacgtttgat

SEQ ID NO: 15940 - DNA, 80 bp, synthetic construct
  misc_feature 1..80: note = Synthetic: >SARSCoV-cand-21560-21639
  source 1..80: mol_type = other DNA
ccacttttgatgatgttcaagctcctaattacactcaacatacttcatctatgaggggggtttactatcctgatgaaatt

SEQ ID NO: 15941 - DNA, 80 bp, synthetic construct
  misc_feature 1..80: note = Synthetic: >SARSCoV-cand-21640-21719
  source 1..80: mol_type = other DNA
tttagatcagacactctttatttaactcaggatttatttcttccattttattctaatgttacagggtttcatactattaa

SEQ ID NO: 15942 - DNA, 80 bp, synthetic construct
  misc_feature 1..80: note = Synthetic: >SARSCoV-cand-21720-21799
  source 1..80: mol_type = other DNA
tcatacgtcagataggtatacctattttggcaaccctgtcataccttttaaggatggtatttattttgctgccacagaga

SEQ ID NO: 15943 - DNA, 80 bp, synthetic construct
  misc_feature 1..80: note = Synthetic: >SARSCoV-cand-21880-21959
  source 1..80: mol_type = other DNA
actaatgttgttatacgagcatgtaactttgaattgtgtgacaaccctttctttgctgtttctaaacccatgggtacaca

SEQ ID NO: 15944 - DNA, 80 bp, synthetic construct
  misc_feature 1..80: note = Synthetic: >SARSCoV-cand-21960-22039
  source 1..80: mol_type = other DNA
gacacatactatgatattcgataatgcatttaattgcactttcgagtacatatctgatgccttttcgcttgatgtttcag

SEQ ID NO: 15945 - DNA, 80 bp, synthetic construct
  misc_feature 1..80: note = Synthetic: >SARSCoV-cand-22120-22199
  source 1..80: mol_type = other DNA
caacctatagatgtagttcgtgatctaccttctggttttaacactttgaaacctatttttaagttgcctcttggtattaa

SEQ ID NO: 15946 - DNA, 80 bp, synthetic construct
  misc_feature 1..80: note = Synthetic: >SARSCoV-cand-22200-22279
  source 1..80: mol_type = other DNA
cattacaaattttagagccattcttacagcctttagccaaactacttctaatcacctgctcaagacatttggggcacgtc

SEQ ID NO: 15947 - DNA, 80 bp, synthetic construct
  misc_feature 1..80: note = Synthetic: >SARSCoV-cand-22360-22439
  source 1..80: mol_type = other DNA
ctgttgattgttctcaaaatccacttgctgaactcaaatgctctgttaagagctttgagattgacaaaggaatttaccag

SEQ ID NO: 15948 - DNA, 80 bp, synthetic construct
  misc_feature 1..80: note = Synthetic: >SARSCoV-cand-22440-22519
  source 1..80: mol_type = other DNA
acctctaatttcagggttgttccctcaggagatgttgtgagattccctaatattacaaacttgtgtccttttggagaggt

SEQ ID NO: 15949 - DNA, 80 bp, synthetic construct
  misc_feature 1..80: note = Synthetic: >SARSCoV-cand-22520-22599
  source 1..80: mol_type = other DNA
ttttaatgctactaaattcccttctgtctatgcatgggagagaaaaaaaatttctaattgtgttgctgattactctgtgc

SEQ ID NO: 15950 - DNA, 80 bp, synthetic construct
  misc_feature 1..80: note = Synthetic: >SARSCoV-cand-22600-22679
  source 1..80: mol_type = other DNA
tctacaactcaacatttttttcaacctttaagtgctatggcgtttctgccactaagttgaatgatctttgcttctccaat

SEQ ID NO: 15951 - DNA, 80 bp, synthetic construct
  misc_feature 1..80: note = Synthetic: >SARSCoV-cand-22680-22759
  source 1..80: mol_type = other DNA
gtctatgcagattcttttgtagtcaagggagatgatgtaagacaaatagcgccaggacaaactggtgttattgctgatta

SEQ ID NO: 15952 - DNA, 80 bp, synthetic construct
  misc_feature 1..80: note = Synthetic: >SARSCoV-cand-22760-22839
  source 1..80: mol_type = other DNA
taattataaattgccagatgatttcatgggttgtgtccttgcttggaatactaggaacattgatgctacttcaactggta

SEQ ID NO: 15953 - DNA, 80 bp, synthetic construct
  misc_feature 1..80: note = Synthetic: >SARSCoV-cand-24210-24289
  source 1..80: mol_type = other DNA
ggagttacccaaaatgttctctatgagaaccaaaaacaaatcgccaaccaatttaacaaggcgattagtcaaattcaaga

SEQ ID NO: 15954 - DNA, 80 bp, synthetic construct
  misc_feature 1..80: note = Synthetic: >SARSCoV-cand-24370-24449
  source 1..80: mol_type = other DNA
ttaaacaacttagctctaattttggtgcaatttcaagtgtgctaaatgatatcctttcgcgacttgataaagtcgaggcg

SEQ ID NO: 15955 - DNA, 80 bp, synthetic construct
  misc_feature 1..80: note = Synthetic: >SARSCoV-cand-24610-24689
  source 1..80: mol_type = other DNA
gtggaaagggctaccaccttatgtccttcccacaagcagccccgcatggtgttgtcttcctacatgtcacgtatgtgcca

SEQ ID NO: 15956 - DNA, 80 bp, synthetic construct
  misc_feature 1..80: note = Synthetic: >SARSCoV-cand-24770-24849
  source 1..80: mol_type = other DNA
gtttaatggcacttcttggtttattacacagaggaacttcttttctccacaaataattactacagacaatacatttgtct

SEQ ID NO: 15957 - DNA, 80 bp, synthetic construct
  misc_feature 1..80: note = Synthetic: >SARSCoV-cand-24850-24929
  source 1..80: mol_type = other DNA
caggaaattgtgatgtcgttattggcatcattaacaacacagtttatgatcctctgcaacctgagcttgactcattcaaa

SEQ ID NO: 15958 - DNA, 80 bp, synthetic construct
  misc_feature 1..80: note = Synthetic: >SARSCoV-cand-25250-25329
  source 1..80: mol_type = other DNA
tgatgaggatgactctgagccagttctcaagggtgtcaaattacattacacataaacgaacttaatggatttgtttatga

SEQ ID NO: 15959 - DNA, 80 bp, synthetic construct
  misc_feature 1..80: note = Synthetic: >SARSCoV-cand-27180-27259
  source 1..80: mol_type = other DNA
actttcaggattgctatttggaatcttgacgttataataagttcaatagtgagacaattatttaagcctctaactaagaa

SEQ ID NO: 15960 - DNA, 80 bp, synthetic construct
  misc_feature 1..80: note = Synthetic: >SARSCoV-cand-27340-27419
  source 1..80: mol_type = other DNA
acattgattgtatttacatcttgcgagctatatcactatcaggagtgtgttagaggtacgactgtactactaaaagaacc

SEQ ID NO: 15961 - DNA, 80 bp, synthetic construct
  misc_feature 1..80: note = Synthetic: >SARSCoV-cand-27420-27499
  source 1..80: mol_type = other DNA
ttgcccatcaggaacatacgagggcaattcaccatttcaccctcttgctgacaataaatttgcactaacttgcactagca

SEQ ID NO: 15962 - DNA, 80 bp, synthetic construct
  misc_feature 1..80: note = Synthetic: >SARSCoV-cand-27500-27579
  source 1..80: mol_type = other DNA
cacactttgcttttgcttgtgctgacggtactcgacatacctatcagctgcgtgcaagatcagtttcaccaaaacttttc

SEQ ID NO: 15963 - DNA, 80 bp, synthetic construct
  misc_feature 1..80: note = Synthetic: >SARSCoV-cand-27580-27659
  source 1..80: mol_type = other DNA
atcagacaagaggaggttcaacaagagctctactcgccactttttctcattgttgctgctctagtatttttaatactttg

SEQ ID NO: 15964 - DNA, 80 bp, synthetic construct
  misc_feature 1..80: note = Synthetic: >SARSCoV-cand-27740-27819
  source 1..80: mol_type = other DNA
ccttgttttaataatgcttattatattttggttttcactcgaaatccaggatctagaagaaccttgtaccaaagtctaaa

SEQ ID NO: 15965 - DNA, 80 bp, synthetic construct
  misc_feature 1..80: note = Synthetic: >SARSCoV-cand-27820-27899
  source 1..80: mol_type = other DNA
cgaacatgaaacttctcattgttttgacttgtatttctctatgcagttgcatgcataaagaatgcactgtagtacagcgc

SEQ ID NO: 15966 - DNA, 80 bp, synthetic construct
  misc_feature 1..80: note = Synthetic: >SARSCoV-cand-27900-27979
  source 1..80: mol_type = other DNA
tgtgcatctaataaacctcatgtgcttgaagatccttgtccaatacattactattcggactggaatataaggtacaacac

SEQ ID NO: 15967 - DNA, 80 bp, synthetic construct
  misc_feature 1..80: note = Synthetic: >SARSCoV-cand-29260-29339
  source 1..80: mol_type = other DNA
tgacaaagatccacaattcaaagacaacgtcatactgctgaacaagcacattgacgcatacaaaacattcccaccaacag

SEQ ID NO: 15968 - DNA, 80 bp, synthetic construct
  misc_feature 1..80: note = Synthetic: >SARSCoV-cand-29340-29419
  source 1..80: mol_type = other DNA
agcctaaaaaggacaaaaagaaaaagactgatgaagctcagcctttgccgcagagacaaaagaagcagcccactgtgact

SEQ ID NO: 15969 - DNA, 80 bp, synthetic construct
  misc_feature 1..80: note = Synthetic: >SARSCoV-cand-29420-29499
  source 1..80: mol_type = other DNA
cttcttcctgcggctgacatggatgatttctccagacaacttcaaaattccatgagtggagcttctgctgattcaactca

SEQ ID NO: 15970 - DNA, 80 bp, synthetic construct
  misc_feature 1..80: note = Synthetic: >SARSCoV-cand-29500-29579
  source 1..80: mol_type = other DNA
ggcataaacactcatgatgaccacacaaggcagatgggctatgtaaacgttttcgcaattccgtttacgatacatagtct

SEQ ID NO: 15971 - DNA, 80 bp, synthetic construct
  misc_feature 1..80: note = Synthetic: >SARSCoV-cand-29740-29819
  source 1..80: mol_type = other DNA
tgaataatgctagggagagctgcctatatggaagagccctaatgtgtaaaattaattttagtagtgctatccccatgtga

SEQ ID NO: 15972 - DNA, 80 bp, synthetic construct
  misc_feature 1..80: note = Synthetic: >SARSCoV2-cand-10-89
  source 1..80: mol_type = other DNA
ccttcccaggtaacaaaccaaccaactttcgatctcttgtagatctgttctctaaacgaactttaaaatctgtgtggctg

SEQ ID NO: 15973 - DNA, 80 bp, synthetic construct
  misc_feature 1..80: note = Synthetic: >SARSCoV2-cand-90-169
  source 1..80: mol_type = other DNA
tcactcggctgcatgcttagtgcactcacgcagtataattaataactaattactgtcgttgacaggacacgagtaactcg

SEQ ID NO: 15974 - DNA, 80 bp, synthetic construct
  misc_feature 1..80: note = Synthetic: >SARSCoV2-cand-330-409
  source 1..80: mol_type = other DNA
cgcgacgtgctcgtacgtggctttggagactccgtggaggaggtcttatcagaggcacgtcaacatcttaaagatggcac

SEQ ID NO: 15975 - DNA, 80 bp, synthetic construct
  misc_feature 1..80: note = Synthetic: >SARSCoV2-cand-410-489
  source 1..80: mol_type = other DNA
ttgtggcttagtagaagttgaaaaaggcgttttgcctcaacttgaacagccctatgtgttcatcaaacgttcggatgctc

SEQ ID NO: 15976 - DNA, 80 bp, synthetic construct
  misc_feature 1..80: note = Synthetic: >SARSCoV2-cand-490-569
  source 1..80: mol_type = other DNA
gaactgcacctcatggtcatgttatggttgagctggtagcagaactcgaaggcattcagtacggtcgtagtggtgagaca

SEQ ID NO: 15977 - DNA, 80 bp, synthetic construct
  misc_feature 1..80: note = Synthetic: >SARSCoV2-cand-570-649
  source 1..80: mol_type = other DNA
cttggtgtccttgtccctcatgtgggcgaaataccagtggcttaccgcaaggttcttcttcgtaagaacggtaataaagg

SEQ ID NO: 15978 - DNA, 80 bp, synthetic construct
  misc_feature 1..80: note = Synthetic: >SARSCoV2-cand-650-729
  source 1..80: mol_type = other DNA
agctggtggccatagttacggcgccgatctaaagtcatttgacttaggcgacgagcttggcactgatccttatgaagatt

SEQ ID NO: 15979 - DNA, 80 bp, synthetic construct
  misc_feature 1..80: note = Synthetic: >SARSCoV2-cand-27650-27729
  source 1..80: mol_type = other DNA
atcagacaagaggaagttcaagaactttactctccaatttttcttattgttgcggcaatagtgtttataacactttgctt

SEQ ID NO: 15980 - DNA, 80 bp, synthetic construct
  misc_feature 1..80: note = Synthetic: >SARSCoV2-cand-27810-27889
  source 1..80: mol_type = other DNA
tgttttaattatgcttattatcttttggttctcacttgaactgcaagatcataatgaaacttgtcacgcctaaacgaaca

SEQ ID NO: 15981 - DNA, 80 bp, synthetic construct
  misc_feature 1..80: note = Synthetic: >SARSCoV2-cand-27890-27969
  source 1..80: mol_type = other DNA
tgaaatttcttgttttcttaggaatcatcacaactgtagctgcatttcaccaagaatgtagtttacagtcatgtactcaa

SEQ ID NO: 15982 - DNA, 80 bp, synthetic construct
  misc_feature 1..80: note = Synthetic: >SARSCoV2-cand-27970-28049
  source 1..80: mol_type = other DNA
catcaaccatatgtagttgatgacccgtgtcctattcacttctattctaaatggtatattagagtaggagctagaaaatc

SEQ ID NO: 15983 - DNA, 80 bp, synthetic construct
  misc_feature 1..80: note = Synthetic: >SARSCoV2-cand-28050-28129
  source 1..80: mol_type = other DNA
agcacctttaattgaattgtgcgtggatgaggctggttctaaatcacccattcagtacatcgatatcggtaattatacag

SEQ ID NO: 15984 - DNA, 80 bp, synthetic construct
  misc_feature 1..80: note = Synthetic: >SARSCoV2-cand-28130-28209
  source 1..80: mol_type = other DNA
tttcctgtttaccttttacaattaattgccaggaacctaaattgggtagtcttgtagtgcgttgttcgttctatgaagac

SEQ ID NO: 15985 - DNA, 80 bp, synthetic construct
  misc_feature 1..80: note = Synthetic: >SARSCoV2-cand-28210-28289
  source 1..80: mol_type = other DNA
tttttagagtatcatgacgttcgtgttgttttagatttcatctaaacgaacaaactaaaatgtctgataatggaccccaa

SEQ ID NO: 15986 - DNA, 80 bp, synthetic construct
  misc_feature 1..80: note = Synthetic: >SARSCoV2-cand-28290-28369
  source 1..80: mol_type = other DNA
aatcagcgaaatgcaccccgcattacgtttggtggaccctcagattcaactggcagtaaccagaatggagaacgcagtgg

SEQ ID NO: 15987 - DNA, 80 bp, synthetic construct
  misc_feature 1..80: note = Synthetic: >SARSCoV2-cand-28370-28449
  source 1..80: mol_type = other DNA
ggcgcgatcaaaacaacgtcggccccaaggtttacccaataatactgcgtcttggttcaccgctctcactcaacatggca

SEQ ID NO: 15988 - DNA, 80 bp, synthetic construct
  misc_feature 1..80: note = Synthetic: >SARSCoV2-cand-28450-28529
  source 1..80: mol_type = other DNA
aggaagaccttaaattccctcgaggacaaggcgttccaattaacaccaatagcagtccagatgaccaaattggctactac

SEQ ID NO: 15989 - DNA, 80 bp, synthetic construct
  misc_feature 1..80: note = Synthetic: >SARSCoV2-cand-28530-28609
  source 1..80: mol_type = other DNA
cgaagagctaccagacgaattcgtggtggtgacggtaaaatgaaagatctcagtccaagatggtatttctactacctagg

SEQ ID NO: 15990 - DNA, 80 bp, synthetic construct
  misc_feature 1..80: note = Synthetic: >SARSCoV2-cand-28610-28689
  source 1..80: mol_type = other DNA
aactgggccagaagctggacttccctatggtgctaacaaagacggcatcatatgggttgcaactgagggagccttgaata

SEQ ID NO: 15991 - DNA, 80 bp, synthetic construct
  misc_feature 1..80: note = Synthetic: >SARSCoV2-cand-28770-28849
  source 1..80: mol_type = other DNA
ccaaaaggcttctacgcagaagggagcagaggcggcagtcaagcctcttctcgttcctcatcacgtagtcgcaacagttc

SEQ ID NO: 15992 - DNA, 80 bp, synthetic construct
  misc_feature 1..80: note = Synthetic: >SARSCoV2-cand-28850-28929
  source 1..80: mol_type = other DNA
aagaaattcaactccaggcagcagtaggggaacttctcctgctagaatggctggcaatggcggtgatgctgctcttgctt

SEQ ID NO: 15993 - DNA, 80 bp, synthetic construct
  misc_feature 1..80: note = Synthetic: >Alpha2-cand-14470-14549
  source 1..80: mol_type = other DNA
aacacttctctatgatgatattatctgatgatggcgttgtttgttataataaggagtatgcagatttaggttatgtggct

SEQ ID NO: 15994 - DNA, 80 bp, synthetic construct
  misc_feature 1..80: note = Synthetic: >AlphaMink-cand-14480-14559
  source 1..80: mol_type = other DNA
aagcacttctctatgatgatattatctgatgatggcgttgtttgttataataaggagtatgcagatttaggttatgtggc

SEQ ID NO: 15995 - DNA, 80 bp, synthetic construct
  misc_feature 1..80: note = Synthetic: >MinkCoV1-cand-14510-14589
  source 1..80: mol_type = other DNA
cttctctatgatgatattatctgatgatggcgttgtttgttataataaagagtatgcagatttaggttatgttgctgaca

SEQ ID NO: 15996 - DNA, 80 bp, synthetic construct
  misc_feature 1..80: note = Synthetic: >WIV16-cand-14590-14669
  source 1..80: mol_type = other DNA
actgtcaaacccggtaattttaacaaagacttttatgactttgctgtgtctaaaggtttctttaaggaaggaagttctgt

SEQ ID NO: 15997 - DNA, 80 bp, synthetic construct
  misc_feature 1..80: note = Synthetic: >BtRf_AlphaCoV-cand-12620-12699
  source 1..80: mol_type = other DNA
cgagactcttaaagaaattttggttcttacgggctgttgtgatcaatcttattttgataataaggtctggtatgatcctg

SEQ ID NO: 15998 - DNA, 80 bp, synthetic construct
  misc_feature 1..80: note = Synthetic: >Sb512-cand-8600-8679
  source 1..80: mol_type = other DNA
actatgtgtgtggtacaggcttcttttcactgctttttaatgtgattggcatgttttctaattctataccagtcactgtt

SEQ ID NO: 15999 - DNA, 80 bp, synthetic construct
  misc_feature 1..80: note = Synthetic: >Sk512R-cand-8590-8669
  source 1..80: mol_type = other DNA
gtgactatgtgtgtggtacaggcttcttttcattgctttttaatgtgattggcatgttttctaattctataccagtcact

SEQ ID NO: 16000 - DNA, 80 bp, synthetic construct
  misc_feature 1..80: note = Synthetic: >Sk512R-cand-14480-14559
  source 1..80: mol_type = other DNA
aacatgattagaatgatttctgcaatgatacttggttctaagcacgttaactgctgtagttctagcgataggtactacag

SEQ ID NO: 16001 - DNA, 80 bp, synthetic construct
  misc_feature 1..80: note = Synthetic: >BtSk_AlphaCoV-cand-14450-14529
  source 1..80: mol_type = other DNA
gaatgatttctgcaatgatacttggctctaagcacgttaactgctgtagttctagcgataggtactacagattgtgtaac

SEQ ID NO: 16002 - DNA, 80 bp, synthetic construct
  misc_feature 1..80: note = Synthetic: >Sb512-cand-14500-14579
  source 1..80: mol_type = other DNA
tgatttctgcaatgatacttggttctaagcacgttaactgctgtagttctagcgataggtactacagattgtgtaacgaa

SEQ ID NO: 16003 - DNA, 80 bp, synthetic construct
  misc_feature 1..80: note = Synthetic: >HKU2R-cand-18530-18609
  source 1..80: mol_type = other DNA
aaccaatgttgcatttgagctgtatgctaagcgcaaaattggtcttacaccgccacttaccattctgaaaaatatgggtg

SEQ ID NO: 16004 - DNA, 80 bp, synthetic construct
  misc_feature 1..80: note = Synthetic: >Sk512R-cand-450-529
  source 1..80: mol_type = other DNA
gaagacgacgatgtcgtcatgctaatcactggtgtcacccaattgagggcttatttgggcacttttggtgaccgacctct

SEQ ID NO: 16005 - DNA, 80 bp, synthetic construct
  misc_feature 1..80: note = Synthetic: >Sb512-cand-12110-12189
  source 1..80: mol_type = other DNA
aagcacctagtggtcctgttgttaagtacttgtactttgtgcgcaaccttaacaatttgcgcagaggtgcagtgctaggt

SEQ ID NO: 16006 - DNA, 80 bp, synthetic construct
  misc_feature 1..80: note = Synthetic: >Sk512R-cand-12100-12179
  source 1..80: mol_type = other DNA
tggaagcacctagtggtcctgttgttaagtacttgtactttgtgcgcaaccttaacaatttgcgcagaggtgcagtgcta

SEQ ID NO: 16007 - DNA, 80 bp, synthetic construct
  misc_feature 1..80: note = Synthetic: >BtSk_AlphaCoV-cand-12070-12149
  source 1..80: mol_type = other DNA
acctagtggtcctgttgttaagtacttgtactttgtgcgcaaccttaacaatttgcgcagaggtgcagtgctaggtttta

SEQ ID NO: 16008 - DNA, 80 bp, synthetic construct
  misc_feature 1..80: note = Synthetic: >Sk512R-cand-27840-27919
  source 1..80: mol_type = other DNA
cgcttgacgagcctatatggaagagcgtgcatagtgtaatcgtctaaaagactatctagtaactgaagacctagctgctt

SEQ ID NO: 16009 - DNA, 80 bp, synthetic construct
  misc_feature 1..80: note = Synthetic: >BtSk_AlphaCoV-cand-28140-28219
  source 1..80: mol_type = other DNA
ctatatggaagagcgtgcatagtgtaatcgtctaaaagactatctagtaactgaagacctagctgctttgatagggatac

SEQ ID NO: 16010 - DNA, 80 bp, synthetic construct
  misc_feature 1..80: note = Synthetic: >BtRf_AlphaCoV-cand-18090-18169
  source 1..80: mol_type = other DNA
aagcccatgccatttttcttttatgatgatggtgaatgtgatgtttcacagggacagattaattatgtgccacttcgtgc

SEQ ID NO: 16011 - DNA, 80 bp, synthetic construct
  misc_feature 1..80: note = Synthetic: >SEAC-cand-18280-18359
  source 1..80: mol_type = other DNA
ctaagcttaagcccatgccatttttcttttatgatgatggtgaatgtgatgtttcacagggacagattaattatgtgcca

SEQ ID NO: 16012 - DNA, 80 bp, synthetic construct
  misc_feature 1..80: note = Synthetic: >HKU2R-cand-18130-18209
  source 1..80: mol_type = other DNA
tgccatttttcttttatgatgatggtgaatgtgatgtttcacaggggcagattaattatgtgccacttcgtgctactgtg

SEQ ID NO: 16013 - DNA, 80 bp, synthetic construct
  misc_feature 1..80: note = Synthetic: >HKU17-cand-12750-12829
  source 1..80: mol_type = other DNA
cacagactacagctactacaggtataatacccccacaatgttagatatcaagatgttcttgttttgccttgaggtggcgg

SEQ ID NO: 16014 - DNA, 80 bp, synthetic construct
  misc_feature 1..80: note = Synthetic: >Sb512-cand-9320-9399
  source 1..80: mol_type = other DNA
tacaagctggcttacgtaagatggcccagccttcaggtattgtggaaggttgtattgtcagagtttcttatggtaatttg

SEQ ID NO: 16015 - DNA, 80 bp, synthetic construct
  misc_feature 1..80: note = Synthetic: >HKU16-cand-17020-17099
  source 1..80: mol_type = other DNA
cacgatataggaaatcctaaaggaataccgatcgtgcgcaaagctggtgttaaatatcacttctatgatcaagcacctat

SEQ ID NO: 16016 - DNA, 80 bp, synthetic construct
  misc_feature 1..80: note = Synthetic: >HKU24-cand-17140-17219
  source 1..80: mol_type = other DNA
ctcgagttgtttacacagcggcgagccacgcggccgttgatgctttgtgtgagaaggcatacaaatttttgaatttaaat

SEQ ID NO: 16017 - DNA, 80 bp, synthetic construct
  misc_feature 1..80: note = Synthetic: >HKU23-cand-11760-11839
  source 1..80: mol_type = other DNA
aattgcttgcaacatttgcatgttgcttctaactctaagttgtggcagtattgtagcactttgcacaatgaaatacttgc

SEQ ID NO: 16018 - DNA, 80 bp, synthetic construct
  misc_feature 1..80: note = Synthetic: >HKU17-cand-11040-11119
  source 1..80: mol_type = other DNA
ctcttttgacctatttggctttcgctgtagaccctaaggctgcctaccttaagcaccttgctgacggtgggtcacctata

SEQ ID NO: 16019 - DNA, 80 bp, synthetic construct
  misc_feature 1..80: note = Synthetic: >HKU24-cand-16500-16579
  source 1..80: mol_type = other DNA
atggtttttggtctatataagcaatcttgtacaggttctccctttatagatgattttaatcgcattgctagttgtaaatg

SEQ ID NO: 16020 - DNA, 80 bp, synthetic construct
  misc_feature 1..80: note = Synthetic: >Sk512R-cand-8040-8119
  source 1..80: mol_type = other DNA
gaaaaacctctagattgtgtgcacaatgcttttgtcaacttcaatgaatggcacaatgctaaatttggtagtacacctac

SEQ ID NO: 16021 - DNA, 80 bp, synthetic construct
  misc_feature 1..80: note = Synthetic: >Alpha2-cand-28810-28889
  source 1..80: mol_type = other DNA
tagtgatacacaaaaaaaaaaaaaaaaaaaaaaaaaaaaaaaaaaaaaaaaaaaaaaaaaaaaaaaaaaaaaaaaaaaaa

SEQ ID NO: 16022 - DNA, 80 bp, synthetic construct
  misc_feature 1..80: note = Synthetic: >HKU24-cand-15780-15859
  source 1..80: mol_type = other DNA
agtgcctttcaacaggtgctgtattatcaaaataacgtgtttatgtcagaatccaaatgttgggttgaaaatgacataaa

SEQ ID NO: 16023 - DNA, 80 bp, synthetic construct
  misc_feature 1..80: note = Synthetic: >BatCoV1A-cand-26780-26859
  source 1..80: mol_type = other DNA
ttgtggagggcataccggttgctaacggaatcacggtgggacaactacctgaattcgtaactgttgccaaagctaccact

SEQ ID NO: 16024 - DNA, 80 bp, synthetic construct
  misc_feature 1..80: note = Synthetic: >MbCoV1-cand-26610-26689
  source 1..80: mol_type = other DNA
ccttgtggagggcataccggttgctaacggaatcacggtgggacaactacctgaattcgtaactgttgccaaagctacca

SEQ ID NO: 16025 - DNA, 80 bp, synthetic construct
  misc_feature 1..80: note = Synthetic: >MsbCoV1-cand-26600-26679
  source 1..80: mol_type = other DNA
gctccttgtggagggcataccggttgctaacggaatcacggtgggacaactacctgaattcgtaactgttgccaaagcta

SEQ ID NO: 16026 - DNA, 80 bp, synthetic construct
  misc_feature 1..80: note = Synthetic: >HKU24-cand-30440-30519
  source 1..80: mol_type = other DNA
ctgttcaacagtgtttcggcaaaaggggccccagccagaattttggtggtggtagtatgctcaaattgggaactagtgac

SEQ ID NO: 16027 - DNA, 80 bp, synthetic construct
  misc_feature 1..80: note = Synthetic: >HKU2R-cand-13540-13619
  source 1..80: mol_type = other DNA
agttaacacttaagcattttttctttgctcaaaagggtgatgctgctgttgctgattttgactattctaggtacaataag

SEQ ID NO: 16028 - DNA, 80 bp, synthetic construct
  misc_feature 1..80: note = Synthetic: >Sk512R-cand-13060-13139
  source 1..80: mol_type = other DNA
ctactttgacaataagctatggtttgatcctgttgaaaatgaagacatccatcgtgtctatgccaaattgggtactattg

SEQ ID NO: 16029 - DNA, 80 bp, synthetic construct
  misc_feature 1..80: note = Synthetic: >BtSk_AlphaCoV-cand-13030-13109
  source 1..80: mol_type = other DNA
gacaataagctatggtttgatcctgttgaaaatgaagacatccatcgtgtctatgccaaattgggtactattgttgcccg

SEQ ID NO: 16030 - DNA, 80 bp, synthetic construct
  misc_feature 1..80: note = Synthetic: >HKU17-cand-6250-6329
  source 1..80: mol_type = other DNA
caatcctaacaacattctgccacattacgcctttgatttctcaaccctcaacgcagaagaccagtctaccattttggaga

SEQ ID NO: 16031 - DNA, 80 bp, synthetic construct
  misc_feature 1..80: note = Synthetic: >BtRf_AlphaCoV-cand-18170-18249
  source 1..80: mol_type = other DNA
cactgtgtgtattactaagtgtaatattggtggtgctgtttgtaagcgacacgctagtctttatagggcttatgttgagg

SEQ ID NO: 16032 - DNA, 80 bp, synthetic construct
  misc_feature 1..80: note = Synthetic: >HKU2R-cand-18210-18289
  source 1..80: mol_type = other DNA
tgtattactaagtgtaatattggtggtgctgtttgtaagcgacacgctagtctttatagggcttatgttgaggcttataa

SEQ ID NO: 16033 - DNA, 80 bp, synthetic construct
  misc_feature 1..80: note = Synthetic: >SEAC-cand-18360-18439
  source 1..80: mol_type = other DNA
cttcgtgctaccgtgtgtattactaagtgtaatattggcggtgctgtttgtaagcgacacgctagtctttatagggctta

SEQ ID NO: 16034 - DNA, 80 bp, synthetic construct
  misc_feature 1..80: note = Synthetic: >Sb512-cand-2860-2939
  source 1..80: mol_type = other DNA
ccaggtgttgatggcaagctcgtaattcttgatgattattccttctattcggatggtacaaattactacccttctgatgg

SEQ ID NO: 16035 - DNA, 80 bp, synthetic construct
  misc_feature 1..80: note = Synthetic: >Sk512R-cand-2850-2929
  source 1..80: mol_type = other DNA
gagccaggtgttgatggtaagctcgtaattcttgatgattattccttctattcggatggtacaaattactacccttctga

SEQ ID NO: 16036 - DNA, 80 bp, synthetic construct
  misc_feature 1..80: note = Synthetic: >BetaSp-cand-28540-28619
  source 1..80: mol_type = other DNA
tgatatcagggctagatataagaaataccacaaacccatccgcaaggattggtactgtgtcttatacaattaacactccg

SEQ ID NO: 16037 - DNA, 80 bp, synthetic construct
  misc_feature 1..80: note = Synthetic: >HKU24-cand-28040-28119
  source 1..80: mol_type = other DNA
tcagggctagatataagaaataccacaaacccatccgcaaggattggtactgtgtgttatacaattagaaccccgcctac

SEQ ID NO: 16038 - DNA, 80 bp, synthetic construct
  misc_feature 1..80: note = Synthetic: >Quail-cand-13880-13959
  source 1..80: mol_type = other DNA
cagttcagaaccttgaacgttacatctcacttgcaattgacgcttatccgcttactaaagttgaccctataaagggtaaa

SEQ ID NO: 16039 - DNA, 80 bp, synthetic construct
  misc_feature 1..80: note = Synthetic: >MinkCoV1-cand-14590-14669
  source 1..80: mol_type = other DNA
taagtgcttttaaatctgtactttactaccaaaacaacgtctttatgtcttctgccaagtgttgggttgaaccagactta

SEQ ID NO: 16040 - DNA, 80 bp, synthetic construct
  misc_feature 1..80: note = Synthetic: >MsbCoV1-cand-17120-17199
  source 1..80: mol_type = other DNA
gttgtcctgcggaaatcgtgaacacagtttcagagcttgtttatgaaaataagtttaagcctgttcatgatgatagtaag

SEQ ID NO: 16041 - DNA, 80 bp, synthetic construct
  misc_feature 1..80: note = Synthetic: >MbCoV1-cand-17140-17219
  source 1..80: mol_type = other DNA
ggaaatcgtgaacacagtctcagagcttgtttatgaaaataagtttaagcctgttcatgatgatagtaagcagtgtttca

SEQ ID NO: 16042 - DNA, 80 bp, synthetic construct
  misc_feature 1..80: note = Synthetic: >BatCoV1A-cand-17300-17379
  source 1..80: mol_type = other DNA
ttgtcctgcggaaatcgtgaacacagtttcagaacttgtatatgaaaacaagtttaagcctgttcatgatgatagcaagc

SEQ ID NO: 16043 - DNA, 80 bp, synthetic construct
  misc_feature 1..80: note = Synthetic: >BtRf_AlphaCoV-cand-18250-18329
  source 1..80: mol_type = other DNA
cttataatacttttactcagaatggttttaacatttggtgtcccaacagttttgatgtttataatttatggcaaactcta

SEQ ID NO: 16044 - DNA, 80 bp, synthetic construct
  misc_feature 1..80: note = Synthetic: >SEAC-cand-18440-18519
  source 1..80: mol_type = other DNA
tgttgaggcttataatacttttactcagaatggttttaacatttggtgtcccaacagttttgatgtttataatttatggc

SEQ ID NO: 16045 - DNA, 80 bp, synthetic construct
  misc_feature 1..80: note = Synthetic: >HKU2R-cand-18290-18369
  source 1..80: mol_type = other DNA
tacttttactcagaatggttttaacatttggtgtcccaacagttttgatgtttacaatttatggcaaactctagttgaca

SEQ ID NO: 16046 - DNA, 80 bp, synthetic construct
  misc_feature 1..80: note = Synthetic: >Quail-cand-15320-15399
  source 1..80: mol_type = other DNA
cttatcagttaccttcacccagaaccatgcttacgtctggtcagctcttaccagctgactataacgtagttacagatata

SEQ ID NO: 16047 - DNA, 80 bp, synthetic construct
  misc_feature 1..80: note = Synthetic: >Sk512R-cand-16080-16159
  source 1..80: mol_type = other DNA
cttcgcacaatgttcaaccgttgagagcacctacaataattaaccaagaacgttattctactctgcacaagcttagacca

SEQ ID NO: 16048 - DNA, 80 bp, synthetic construct
  misc_feature 1..80: note = Synthetic: >BtSk_AlphaCoV-cand-16050-16129
  source 1..80: mol_type = other DNA
tgttcaaccgttgagagcacctacaataattaaccaagaacgttattccactctgcataagcttagaccagccttcaaca

SEQ ID NO: 16049 - DNA, 80 bp, synthetic construct
  misc_feature 1..80: note = Synthetic: >Sb512-cand-16100-16179
  source 1..80: mol_type = other DNA
tcaaccgttgagagcacctacaataattaaccaagaacgttattctactctgcataagcttagaccagccttcaacattc

SEQ ID NO: 16050 - DNA, 80 bp, synthetic construct
  misc_feature 1..80: note = Synthetic: >Sb512-cand-8760-8839
  source 1..80: mol_type = other DNA
cttgtttggcgatatgtcatttggcgttcttagtgttggcctgtgcacagtggtgaataatttgtcatatgttgtaactc

SEQ ID NO: 16051 - DNA, 80 bp, synthetic construct
  misc_feature 1..80: note = Synthetic: >Sk512R-cand-8750-8829
  source 1..80: mol_type = other DNA
gcgcttgtttggcgatatgtcatttggcgttcttagtgttggactgtgcacagtggtgaacaatttgtcatatgttgtaa

SEQ ID NO: 16052 - DNA, 80 bp, synthetic construct
  misc_feature 1..80: note = Synthetic: >MsbCoV1-cand-16480-16559
  source 1..80: mol_type = other DNA
cacaatgttccgccattaagagcgcctaccattgcaaatcagcaacgttatgcatctatttacaaatttcttcctgtttt

SEQ ID NO: 16053 - DNA, 80 bp, synthetic construct
  misc_feature 1..80: note = Synthetic: >MbCoV1-cand-16500-16579
  source 1..80: mol_type = other DNA
cgccattaagagcgcctaccattgcaaatcaggaacgttatgcatccatttataagttgcgtcctgtttttaatattagt

SEQ ID NO: 16054 - DNA, 80 bp, synthetic construct
  misc_feature 1..80: note = Synthetic: >BtRl_BetaCoV-cand-28090-28169
  source 1..80: mol_type = other DNA
aaaaccagcgtagtgccccccgcattacatttggtggacccacagattcaactgacaataaccaggatggaggacgcagt

SEQ ID NO: 16055 - DNA, 80 bp, synthetic construct
  misc_feature 1..80: note = Synthetic: >SARSRC-cand-28100-28179
  source 1..80: mol_type = other DNA
ccaaaaccaacgtagtgccccccgcattacatttggtggaccctcagattcaactgacaataaccaggatggaggacgca

SEQ ID NO: 16056 - DNA, 80 bp, synthetic construct
  misc_feature 1..80: note = Synthetic: >HKU24-cand-250-329
  source 1..80: mol_type = other DNA
gccccagaatttccgtggatgtttgaggacacagaggagaagttgggtaaccctgatagcggagatggggatgggttttg

SEQ ID NO: 16057 - DNA, 80 bp, synthetic construct
  misc_feature 1..80: note = Synthetic: >Sk512R-cand-19440-19519
  source 1..80: mol_type = other DNA
aaaccacattgggtggtttgcatttacttatatcacaaatacgtctttctaagataggtgttcttaaagttgaagatttt

SEQ ID NO: 16058 - DNA, 80 bp, synthetic construct
  misc_feature 1..80: note = Synthetic: >HghCoV1-cand-19810-19889
  source 1..80: mol_type = other DNA
aaaatcttcaccaagagtggtgtaaatgatgtgtgtgtctttgagaataagactaaccttcctactaatgtagcatttga

SEQ ID NO: 16059 - DNA, 80 bp, synthetic construct
  misc_feature 1..80: note = Synthetic: >WIV16-cand-24170-24249
  source 1..80: mol_type = other DNA
aaaatgttctctatgagaaccaaaaacaaatcgccaatcaatttaacaaggcgatcagccaaattcaagaatcactcaca

SEQ ID NO: 16060 - DNA, 80 bp, synthetic construct
  misc_feature 1..80: note = Synthetic: >Sb512-cand-8840-8919
  source 1..80: mol_type = other DNA
aaaattcaattggcatgcttgcttatgccacattgtactttttgtgtactaaaggtgttagatactcatgggtgtggcat

SEQ ID NO: 16061 - DNA, 80 bp, synthetic construct
  misc_feature 1..80: note = Synthetic: >Sk512R-cand-8830-8909
  source 1..80: mol_type = other DNA
ctcaaaattcaattggcatgcttgcttatgccacattgtactttttgtgtactaaaggtgttagatactcatgggtgtgg

SEQ ID NO: 16062 - DNA, 80 bp, synthetic construct
  misc_feature 1..80: note = Synthetic: >HghCoV1-cand-20050-20129
  source 1..80: mol_type = other DNA
aatgcagctttgaatatatgctttgatattcgtgatcaaggttccttagaaaagtttttaacacttccaaatggaatttt

SEQ ID NO: 16063 - DNA, 80 bp, synthetic construct
  misc_feature 1..80: note = Synthetic: >SEAC-cand-22520-22599
  source 1..80: mol_type = other DNA
aaaattgaaactactggcccaggcttttacggtgactattataactgtaagaaaaatgctatacaagaccttacttgtgc

SEQ ID NO: 16064 - DNA, 80 bp, synthetic construct
  misc_feature 1..80: note = Synthetic: >HKU5R-cand-7520-7599
  source 1..80: mol_type = other DNA
ctggcgttcatacaattacctggtttctggatatttcttttgcgttacacatattcccttgctgggtcttgtgcgtatct

SEQ ID NO: 16065 - DNA, 80 bp, synthetic construct
  misc_feature 1..80: note = Synthetic: >HKU5R-cand-20000-20079
  source 1..80: mol_type = other DNA
tttgaactgtatgctaaaagagctgtgcgctcgcatccagatttcaatttgctacgtaatttagaagtagatgtctgcta

SEQ ID NO: 16066 - DNA, 80 bp, synthetic construct
  misc_feature 1..80: note = Synthetic: >HKU5R-cand-9920-9999
  source 1..80: mol_type = other DNA
tgcctacattgtgggagtctgtcttcgtcatttactctgggttatggcttacttcagtaagaaacatgttgaagttttta

SEQ ID NO: 16067 - DNA, 80 bp, synthetic construct
  misc_feature 1..80: note = Synthetic: >HKU4R-cand-1880-1959
  source 1..80: mol_type = other DNA
ggtgcaaatggtgtttgcaatgctactattaatgctcctttcattgccttcactggtcttggtgagtcatttaaaaaagt

SEQ ID NO: 16068 - DNA, 80 bp, synthetic construct
  misc_feature 1..80: note = Synthetic: >BetaSp-cand-29500-29579
  source 1..80: mol_type = other DNA
ttcctaaaagaatggaatttctctttgggtatcatactacttgtaatcacaatcatactacagttcggttatacgagccg

SEQ ID NO: 16069 - DNA, 80 bp, synthetic construct
  misc_feature 1..80: note = Synthetic: >WIV16-cand-26430-26509
  source 1..80: mol_type = other DNA
aaagactcctggaacaatggaacctagtaataggtttcctattcctagcctggattatgttactacaatttgcctattct

SEQ ID NO: 16070 - DNA, 80 bp, synthetic construct
  misc_feature 1..80: note = Synthetic: >SARSRC-cand-26360-26439
  source 1..80: mol_type = other DNA
aggagcttaaaagactcctggaacaatggaacctagtaataggcttcctcttcctcgcctggattatgttattacaattt

SEQ ID NO: 16071 - DNA, 80 bp, synthetic construct
  misc_feature 1..80: note = Synthetic: >HKU4R-cand-13550-13629
  source 1..80: mol_type = other DNA
aaagatactaattttttaaacgagtccggggttctagtgtaaatgcccgactagaaccctgttcaagtggtttaaccact

SEQ ID NO: 16072 - DNA, 80 bp, synthetic construct
  misc_feature 1..80: note = Synthetic: >MsbCoV1-cand-6890-6969
  source 1..80: mol_type = other DNA
aaagatcatgtcgaaggttacagtaattccacttttgtgaaagatgagtactgtgcctccactatgtgtaaggtatgctt

SEQ ID NO: 16073 - DNA, 80 bp, synthetic construct
  misc_feature 1..80: note = Synthetic: >HghCoV1-cand-680-759
  source 1..80: mol_type = other DNA
aagaatggacttggtggacaattgttccgcgaggttccttggtttgagaaccatgattttcatggtattgaaggcttttc

SEQ ID NO: 16074 - DNA, 80 bp, synthetic construct
  misc_feature 1..80: note = Synthetic: >AlphaMink-cand-26420-26499
  source 1..80: mol_type = other DNA
gagatgaaccttcaccttctcaaaaccgtggtagatctcgttcccgtagtcgtaaaaatgaaaatatacctctgtcattt

SEQ ID NO: 16075 - DNA, 80 bp, synthetic construct
  misc_feature 1..80: note = Synthetic: >Alpha2-cand-26410-26489
  source 1..80: mol_type = other DNA
ggagatgaaccgtcaccttctcaaaatcgtggtagatctcgttcccgtagtcgtaaaaatgaaaatatacctctgtcatt

SEQ ID NO: 16076 - DNA, 80 bp, synthetic construct
  misc_feature 1..80: note = Synthetic: >Alpha2-cand-7650-7729
  source 1..80: mol_type = other DNA
catagttgtaggtactgtatttgacttagtagataatatgagacccgtgccagatgtgccagcttatgtgacacttgttg

SEQ ID NO: 16077 - DNA, 80 bp, synthetic construct
  misc_feature 1..80: note = Synthetic: >SEAC-cand-21480-21559
  source 1..80: mol_type = other DNA
tgaacagaattgttgatggttgcgttcctggtttcgttcttagagttggtcgtggtaaggctgttaacagaactattgtt

SEQ ID NO: 16078 - DNA, 80 bp, synthetic construct
  misc_feature 1..80: note = Synthetic: >MbCoV1-cand-2730-2809
  source 1..80: mol_type = other DNA
aacacagttaagactttcagtggtggtgaaaatcctatcactttctcacgtgttgaagttgctagtgtcgagcttgaaca

SEQ ID NO: 16079 - DNA, 80 bp, synthetic construct
  misc_feature 1..80: note = Synthetic: >MsbCoV1-cand-2720-2799
  source 1..80: mol_type = other DNA
actgttaagactttcagtggtggtgaaaatcctatcactttctcacgtgttgaagttgctagtgtcgagcttgaacatgc

SEQ ID NO: 16080 - DNA, 80 bp, synthetic construct
  misc_feature 1..80: note = Synthetic: >HKU5R-cand-9840-9919
  source 1..80: mol_type = other DNA
cttactggtgagcctgcatttgttatgcacgtctcatggtttgttatgtttggaacagttgtccctatatggatggtgtt

SEQ ID NO: 16081 - DNA, 80 bp, synthetic construct
  misc_feature 1..80: note = Synthetic: >HKU5R-cand-19600-19679
  source 1..80: mol_type = other DNA
aacaccatgcgaagtgcatggtaatggtaatatgttagaagacattgattacgtaccactcaagtcggcagtatgtataa

SEQ ID NO: 16082 - DNA, 80 bp, synthetic construct
  misc_feature 1..80: note = Synthetic: >WIV16-cand-11510-11589
  source 1..80: mol_type = other DNA
aacaccttacagtgtatcatgcttgtttattgtttcttaggctattgttgctgctgctattttggccttttctgtttact

SEQ ID NO: 16083 - DNA, 80 bp, synthetic construct
  misc_feature 1..80: note = Synthetic: >BtRl_BetaCoV-cand-11480-11559
  source 1..80: mol_type = other DNA
tacagtgtatcatgcttgtttattgtttcttaggctattgttgctgctgctactttggccttttctgtttactcaaccgt

SEQ ID NO: 16084 - DNA, 80 bp, synthetic construct
  misc_feature 1..80: note = Synthetic: >HghCoV1-cand-18050-18129
  source 1..80: mol_type = other DNA
taacacgtgcacagaagggtatattgtgtgttatgacatctcaggcgttgtttgattctttacaattttctgagttgtct

SEQ ID NO: 16085 - DNA, 80 bp, synthetic construct
  misc_feature 1..80: note = Synthetic: >BtRl_BetaCoV-cand-1040-1119
  source 1..80: mol_type = other DNA
aatttgacaccttcaaaggggaatgcccaaagtttgtatttcctctcaactcaaaagtcaaagtcattcaaccacgtgtt

SEQ ID NO: 16086 - DNA, 80 bp, synthetic construct
  misc_feature 1..80: note = Synthetic: >HKU2R-cand-2760-2839
  source 1..80: mol_type = other DNA
tccctatgctagtgatggtaaagttttgccattgcggtttaggaaaaaggctggtggtaagaatgttgcctttgatgaca

SEQ ID NO: 16087 - DNA, 80 bp, synthetic construct
  misc_feature 1..80: note = Synthetic: >Alpha2-cand-20110-20189
  source 1..80: mol_type = other DNA
ctgtttttgatctaactaaatttaaatgtaagtttaacaatgcattagttgttaatttgaaagatagtgatataaatgtt

SEQ ID NO: 16088 - DNA, 80 bp, synthetic construct
  misc_feature 1..80: note = Synthetic: >MinkCoV1-cand-20150-20229
  source 1..80: mol_type = other DNA
ctttgatctaacaaaatttaaatgtaagtttaacaatgcattagttgttaatttgaaagatagtgatataaatgttatgg

SEQ ID NO: 16089 - DNA, 80 bp, synthetic construct
  misc_feature 1..80: note = Synthetic: >BatCoV1A-cand-27410-27489
  source 1..80: mol_type = other DNA
aacatttgatttcacactacctgatagtcttgagattgttaactctgatagcagacctgcttcacgctctaactctcgta

SEQ ID NO: 16090 - DNA, 80 bp, synthetic construct
  misc_feature 1..80: note = Synthetic: >MsbCoV1-cand-27240-27319
  source 1..80: mol_type = other DNA
ttgacttcacactgcctgacagtcttgaggttgttaactctgacagcagacctgcttcacgctctaactctcgtagtcag

SEQ ID NO: 16091 - DNA, 80 bp, synthetic construct
  misc_feature 1..80: note = Synthetic: >SEAC-cand-18920-18999
  source 1..80: mol_type = other DNA
gtttactttgtgtaagaatggtgtattaatctctaatgtcgctatcaagaaattacgtggtatacgtttgaattttggtt

SEQ ID NO: 16092 - DNA, 80 bp, synthetic construct
  misc_feature 1..80: note = Synthetic: >BtRf_AlphaCoV-cand-18730-18809
  source 1..80: mol_type = other DNA
tgtgtaagaacggtgtgttaatttctaatgttgctatcaagaaattacgtggtatacgtttgaattttggttacttgaat

SEQ ID NO: 16093 - DNA, 80 bp, synthetic construct
  misc_feature 1..80: note = Synthetic: >BtSk_AlphaCoV-cand-820-899
  source 1..80: mol_type = other DNA
gaagactgcacgacaccctaaattgaataagagtgttgttttggagtccccgtttgaccagatctacaaagaagttggtt

SEQ ID NO: 16094 - DNA, 80 bp, synthetic construct
  misc_feature 1..80: note = Synthetic: >Sk512R-cand-850-929
  source 1..80: mol_type = other DNA
ccacaatgaagactgcacgacaccctaaattgaataagagtgttgttttagaatccccgtttgaccagatctacaaagaa

SEQ ID NO: 16095 - DNA, 80 bp, synthetic construct
  misc_feature 1..80: note = Synthetic: >HKU8R-cand-18980-19059
  source 1..80: mol_type = other DNA
gtttataatttgtggcagacgctcgtcacacctaagttgcagagtcttgaaaatgttgcctttaatgtggttaaacatgg

SEQ ID NO: 16096 - DNA, 80 bp, synthetic construct
  misc_feature 1..80: note = Synthetic: >HKU15-cand-8880-8959
  source 1..80: mol_type = other DNA
aaccaccaatagagatggtgcttgtattatgggatcttatgatttcgagtgcgattggacgccagagatggtatacaatc

SEQ ID NO: 16097 - DNA, 80 bp, synthetic construct
  misc_feature 1..80: note = Synthetic: >HKU5R-cand-24240-24319
  source 1..80: mol_type = other DNA
aaccaggctcttcatggtgcaaacctacgtcaagatgagtctattgctaatctattttcaagtattaaaacccagagcac

SEQ ID NO: 16098 - DNA, 80 bp, synthetic construct
  misc_feature 1..80: note = Synthetic: >Sb512-cand-19000-19079
  source 1..80: mol_type = other DNA
tgtgggattatgaagcctcaagacctcttactacttttactaaggatgtttgtaaatatactgattttgatggtgacgtt

SEQ ID NO: 16099 - DNA, 80 bp, synthetic construct
  misc_feature 1..80: note = Synthetic: >BtSk_AlphaCoV-cand-18950-19029
  source 1..80: mol_type = other DNA
ttttgtgggattatgaagcctcaagacctcttactacttttactaaggatgtttgtaaatatactgattttgatggtgat

SEQ ID NO: 16100 - DNA, 80 bp, synthetic construct
  misc_feature 1..80: note = Synthetic: >Sb512-cand-6550-6629
  source 1..80: mol_type = other DNA
aacgtcttgtgtaagatttgcttgtatggttatgaagaactgtcagattttacacacacacgtgttatttggcaacacct

SEQ ID NO: 16101 - DNA, 80 bp, synthetic construct
  misc_feature 1..80: note = Synthetic: >BtSk_AlphaCoV-cand-6510-6589
  source 1..80: mol_type = other DNA
tcttgtgtaagatttgcttgtatggttatgaagaattgtcggattttacacatacacgtgttatttggcaacaccttaaa

SEQ ID NO: 16102 - DNA, 80 bp, synthetic construct
  misc_feature 1..80: note = Synthetic: >Alpha2-cand-14790-14869
  source 1..80: mol_type = other DNA
cgttatgttagtttggcaattgatgcttatcctttaacgaaacaccctaagccatcataccagaaagtgttttacacgtt

SEQ ID NO: 16103 - DNA, 80 bp, synthetic construct
  misc_feature 1..80: note = Synthetic: >AlphaMink-cand-14800-14879
  source 1..80: mol_type = other DNA
gcgttatgttagtttggcaattgatgcttatcccttgacaaaacaccctaagccgtcataccagaaagtgttttacacat

SEQ ID NO: 16104 - DNA, 80 bp, synthetic construct
  misc_feature 1..80: note = Synthetic: >Alpha2-cand-24570-24649
  source 1..80: mol_type = other DNA
aactaaacaatgataggtagtcttattactggtttgtttataacatctattgcgtttttaaaggaagatgttaacattaa

SEQ ID NO: 16105 - DNA, 80 bp, synthetic construct
  misc_feature 1..80: note = Synthetic: >AlphaMink-cand-24580-24659
  source 1..80: mol_type = other DNA
caactaaacaatgataggtagtcttattactggtttgtttataacatctatttcgtttttaaaggaagatgttaatatta

SEQ ID NO: 16106 - DNA, 80 bp, synthetic construct
  misc_feature 1..80: note = Synthetic: >HKU5R-cand-10400-10479
  source 1..80: mol_type = other DNA
tcgccatgttatgtgtcccgctgatcagttatctgaccccaattatgatgctcttcttgtttcaaaaaccaaccttagtt

SEQ ID NO: 16107 - DNA, 80 bp, synthetic construct
  misc_feature 1..80: note = Synthetic: >HKU5R-cand-20640-20719
  source 1..80: mol_type = other DNA
tggaggaaatgcttaaagaaagagctaccgtccataactattttattactgaatcgaacacagcatcgttcaaagcggtc

SEQ ID NO: 16108 - DNA, 80 bp, synthetic construct
  misc_feature 1..80: note = Synthetic: >SEAC-cand-25880-25959
  source 1..80: mol_type = other DNA
agacctgactgttgttgatgttacttctagaagtgcttcacgttcacagtctcgttctcgcaatcaaagtcaaagccgca

SEQ ID NO: 16109 - DNA, 80 bp, synthetic construct
  misc_feature 1..80: note = Synthetic: >Alpha2-cand-28730-28809
  source 1..80: mol_type = other DNA
agacgagccaacaatggaagggctcaacttttggatctagttaattgttaattaccaattgatgataattttccttttga

SEQ ID NO: 16110 - DNA, 80 bp, synthetic construct
  misc_feature 1..80: note = Synthetic: >AlphaMink-cand-28740-28819
  source 1..80: mol_type = other DNA
gacgagccaacaatggaagggctcaacttttggatctagttaattgttaattttaaattgatgataattttccttttgat

SEQ ID NO: 16111 - DNA, 80 bp, synthetic construct
  misc_feature 1..80: note = Synthetic: >WIV16-cand-12390-12469
  source 1..80: mol_type = other DNA
cagccaaactcatggttgttgtccctgattatggtacctacaagaacacttgtgatggtaacacttttacgtatgcgtct

SEQ ID NO: 16112 - DNA, 80 bp, synthetic construct
  misc_feature 1..80: note = Synthetic: >BtRl_BetaCoV-cand-12350-12429
  source 1..80: mol_type = other DNA
cagcagccaaactcatggttgttgtccctgattatggtacctacaagaatacttgtgatggtaacacttttacatatgca

SEQ ID NO: 16113 - DNA, 80 bp, synthetic construct
  misc_feature 1..80: note = Synthetic: >Sk512R-cand-9470-9549
  source 1..80: mol_type = other DNA
agactatgaccatgctatgtctctggttagattacacaatttttcaatttcttcaggcaatatgttcctgggtgttatta

SEQ ID NO: 16114 - DNA, 80 bp, synthetic construct
  misc_feature 1..80: note = Synthetic: >Sb512-cand-9480-9559
  source 1..80: mol_type = other DNA
ctatgaccatgctatgtctctggttagattacacaatttttcaatttcttcaggcaatatgttcctgggtgttattagtg

SEQ ID NO: 16115 - DNA, 80 bp, synthetic construct
  misc_feature 1..80: note = Synthetic: >MsbCoV1-cand-7290-7369
  source 1..80: mol_type = other DNA
catcatgtgttgcttgtagtaagagtgctcgtctcaacagagttcctatgcagactattgttaatggtgctaacaagtct

SEQ ID NO: 16116 - DNA, 80 bp, synthetic construct
  misc_feature 1..80: note = Synthetic: >MbCoV1-cand-7290-7369
  source 1..80: mol_type = other DNA
tgtgaaaaaccatcatgtgtagcttgtagtaagagtgctcgtctcaacagagttcctatgcagactattgttaatggtgc

SEQ ID NO: 16117 - DNA, 80 bp, synthetic construct
  misc_feature 1..80: note = Synthetic: >BtRf_AlphaCoV-cand-17050-17129
  source 1..80: mol_type = other DNA
ggatcggtatggatgtagagggagcgcatgtttgtggtgataatatcggtacaaatgttccattacaagtaggtttctct

SEQ ID NO: 16118 - DNA, 80 bp, synthetic construct
  misc_feature 1..80: note = Synthetic: >SEAC-cand-17240-17319
  source 1..80: mol_type = other DNA
taggggctggattggtatggacgtagagggggctcatgtttgcggtgataatatcggtacaaatgttccattacaagtag

SEQ ID NO: 16119 - DNA, 80 bp, synthetic construct
  misc_feature 1..80: note = Synthetic: >SEAC-cand-3170-3249
  source 1..80: mol_type = other DNA
agtcatactacaatgttccagaatattttatctatgatgaggaaggtggtaatgaccttaatttggatgtcatgatctct

SEQ ID NO: 16120 - DNA, 80 bp, synthetic construct
  misc_feature 1..80: note = Synthetic: >HKU2R-cand-4610-4689
  source 1..80: mol_type = other DNA
agtatgttaatgaccataaggctgttccattcggtaatattttatcacttgattgtggtgcttttactgtagtggatgct

SEQ ID NO: 16121 - DNA, 80 bp, synthetic construct
  misc_feature 1..80: note = Synthetic: >SEAC-cand-4770-4849
  source 1..80: mol_type = other DNA
caacaagtatgttaatgatcataaagctgttccttttggtaacattttgtcacttgattgtggtgcttttactgtagtgg

SEQ ID NO: 16122 - DNA, 80 bp, synthetic construct
  misc_feature 1..80: note = Synthetic: >WIV16-cand-13870-13949
  source 1..80: mol_type = other DNA
cctgacatcttacgcgtatatgctaacttaggtgagcgtgtacgccaagcattattaaagactgtacaattctgcgatgc

SEQ ID NO: 16123 - DNA, 80 bp, synthetic construct
  misc_feature 1..80: note = Synthetic: >HKU4R-cand-10910-10989
  source 1..80: mol_type = other DNA
attgatatgcttgctcaccgaactggtgtttctgttgagcaaatgcttgctgctatccagattctgcatgctggttttca

SEQ ID NO: 16124 - DNA, 80 bp, synthetic construct
  misc_feature 1..80: note = Synthetic: >HKU4R-cand-18350-18429
  source 1..80: mol_type = other DNA
ctaagttattcatcacgcgtgatgaagctataaggcaagttcggagttggataggctttgatgttgaaggcgcacatgct

SEQ ID NO: 16125 - DNA, 80 bp, synthetic construct
  misc_feature 1..80: note = Synthetic: >Quail-cand-17140-17219
  source 1..80: mol_type = other DNA
ggttcagcactatatgttaataagcatgctttcctcactcctgaaatgcatacttatgctacccacaaactaagtttggc

SEQ ID NO: 16126 - DNA, 80 bp, synthetic construct
  misc_feature 1..80: note = Synthetic: >HKU4R-cand-13310-13389
  source 1..80: mol_type = other DNA
gcaactgcagaccaagaaacatatggtggtgcgtctgtgtgtctctattgtagagcacatatagaacatcctgatgtttc

SEQ ID NO: 16127 - DNA, 80 bp, synthetic construct
  misc_feature 1..80: note = Synthetic: >AcCoV_JC34-cand-11970-12049
  source 1..80: mol_type = other DNA
tatttaacagctgttaaacagggtcataaaccacttagtaattgtattaagatgattaataatggtagtggtaatgggct

SEQ ID NO: 16128 - DNA, 80 bp, synthetic construct
  misc_feature 1..80: note = Synthetic: >HKU8R-cand-26100-26179
  source 1..80: mol_type = other DNA
gtaatactgacagtgttcttagttgtgctgcagtatggcaattttaagtattctaaattgctttatggccttaaaatggc

SEQ ID NO: 16129 - DNA, 80 bp, synthetic construct
  misc_feature 1..80: note = Synthetic: >WIV16-cand-24810-24889
  source 1..80: mol_type = other DNA
tgatgtcgtaattggcatcattaacaatacagtttatgatcctctgcaacctgagcttgactcattcaaagaagagctgg

SEQ ID NO: 16130 - DNA, 80 bp, synthetic construct
  misc_feature 1..80: note = Synthetic: >SARSRC-cand-25960-26039
  source 1..80: mol_type = other DNA
caggagttgtaaatccagcaatggacccaatttatgatgagccgacgacgactactagcgtgcctttgtaagcacaagaa

SEQ ID NO: 16131 - DNA, 80 bp, synthetic construct
  misc_feature 1..80: note = Synthetic: >HKU8R-cand-18820-18899
  source 1..80: mol_type = other DNA
tatcaattacgtaccactacatgcttccaattgtgttactaggtgtaatattggcggtgctgtttgtagtaagcatgcca

SEQ ID NO: 16132 - DNA, 80 bp, synthetic construct
  misc_feature 1..80: note = Synthetic: >BtSk_AlphaCoV-cand-6190-6269
  source 1..80: mol_type = other DNA
tgtttacctgtttagtttgctggctatttgttttagagcacttaaaaagagggatatgaaagtcatggccggtgtacctg

SEQ ID NO: 16133 - DNA, 80 bp, synthetic construct
  misc_feature 1..80: note = Synthetic: >Sb512-cand-6230-6309
  source 1..80: mol_type = other DNA
tgattgtttacctgtttagtttgcttgctatttgttttagggcccttaaaaagagggatatgaaagtcatggccggtgta

SEQ ID NO: 16134 - DNA, 80 bp, synthetic construct
  misc_feature 1..80: note = Synthetic: >SEAC-cand-17800-17879
  source 1..80: mol_type = other DNA
caggtgacgctattatgactagatgtcttgcaattcatgattgttttgtaaaaaatgttgactggtctatcacatatccg

SEQ ID NO: 16135 - DNA, 80 bp, synthetic construct
  misc_feature 1..80: note = Synthetic: >SARSRC-cand-7920-7999
  source 1..80: mol_type = other DNA
tagtaccgaggtttctgtcaagatgtttgatgcttatgtcgacaccttttcagcaacttttagtgttcctatggaaaaac

SEQ ID NO: 16136 - DNA, 80 bp, synthetic construct
  misc_feature 1..80: note = Synthetic: >HKU24-cand-14430-14509
  source 1..80: mol_type = other DNA
gttaggcaaatctttgtagatggtgtgccttttgtcgtctcaataggctaccattataaagaattaggtgttgttatgaa

SEQ ID NO: 16137 - DNA, 80 bp, synthetic construct
  misc_feature 1..80: note = Synthetic: >Sk512R-cand-2370-2449
  source 1..80: mol_type = other DNA
tgtgcgttgtgtacttctggttttgaggtttttataccacgtgttccagactgtccaccaattttgaacgacatagatgg

SEQ ID NO: 16138 - DNA, 80 bp, synthetic construct
  misc_feature 1..80: note = Synthetic: >Sb512-cand-2380-2459
  source 1..80: mol_type = other DNA
gcgttgtgtacttctggttttgaggtttttataccacgtgttccagactgtccaccaattttgaacgacatagatggagg

SEQ ID NO: 16139 - DNA, 80 bp, synthetic construct
  misc_feature 1..80: note = Synthetic: >AlphaMink-cand-21450-21529
  source 1..80: mol_type = other DNA
gtttcttataatgaaacattacagaaatttataggtgttttgcctcctagtgttaaagagattgctattagtaaagatgg

SEQ ID NO: 16140 - DNA, 80 bp, synthetic construct
  misc_feature 1..80: note = Synthetic: >MinkCoV1-cand-21510-21589
  source 1..80: mol_type = other DNA
ttacgtttcttataatgaaacgttacagaagtttttgggtgttttgccacctagtgttaaagagattgctattagtaaag

SEQ ID NO: 16141 - DNA, 80 bp, synthetic construct
  misc_feature 1..80: note = Synthetic: >HKU17-cand-4490-4569
  source 1..80: mol_type = other DNA
gtcgcaattggcacttctgccgaagaacctacaggtcccgccattaagtttgccgcagctcactgctggtacactaatgg

SEQ ID NO: 16142 - DNA, 80 bp, synthetic construct
  misc_feature 1..80: note = Synthetic: >HKU5R-cand-3210-3289
  source 1..80: mol_type = other DNA
tctgaagaaatgcttgtcgaggaagatgagaattcctgggctgcagctgttgaagccgttattccaatggaagacgtcca

SEQ ID NO: 16143 - DNA, 80 bp, synthetic construct
  misc_feature 1..80: note = Synthetic: >HghCoV1-cand-28850-28929
  source 1..80: mol_type = other DNA
tacactggaacaggaccagaagctaacctgccattcagaacagtcaaagatggcatctactgggtttgggaagaaggtgc

SEQ ID NO: 16144 - DNA, 80 bp, synthetic construct
  misc_feature 1..80: note = Synthetic: >MT114541-cand-25280-25359
  source 1..80: mol_type = other DNA
acttagcatacttttggtatgttaatagtaggtttgaatttattttatacaacacaacgacactcatgtttgtacatggc

SEQ ID NO: 16145 - DNA, 80 bp, synthetic construct
  misc_feature 1..80: note = Synthetic: >KU556806-cand-24990-25069
  source 1..80: mol_type = other DNA
acttgcctaaagatatatttgtttgcacacctgataggcgtaatatctatcgtatggtgcagaaatacactggtgaccaa

SEQ ID NO: 16146 - DNA, 80 bp, synthetic construct
  misc_feature 1..80: note = Synthetic: >MK957245-cand-24990-25069
  source 1..80: mol_type = other DNA
acttgcctagagacatatttgtgtgcacaccagatagacgtaacatttatcgtatggtgcagaaatacactggtgaccaa

SEQ ID NO: 16147 - DNA, 80 bp, synthetic construct
  misc_feature 1..80: note = Synthetic: >MN307884-cand-400-479
  source 1..80: mol_type = other DNA
tgggctacgttctcgcacaaggtcggctatacgacggttgtagggggtagtgccaaacaacccctgaggtgacaggttct

SEQ ID NO: 16148 - DNA, 80 bp, synthetic construct
  misc_feature 1..80: note = Synthetic: >MK618759-cand-400-479
  source 1..80: mol_type = other DNA
tgggctacgttctcgcacaaggtcgactatacgacggttgtagggggtagtgccgaacaacccctgaggtgacaggttct

SEQ ID NO: 16149 - DNA, 80 bp, synthetic construct
  misc_feature 1..80: note = Synthetic: >MN531555-cand-14730-14809
  source 1..80: mol_type = other DNA
agggaaattctctattaccaaaataatgtttatatgtctgattctaagtgttgggttgaaccagacttagaaaaaggccc

SEQ ID NO: 16150 - DNA, 80 bp, synthetic construct
  misc_feature 1..80: note = Synthetic: >MK618759-cand-560-639
  source 1..80: mol_type = other DNA
cagaggagtgtcattcttgttgccaaagacattcctgaccaacttcgtgacgctttgtttttctatacgtcacacaaccc

SEQ ID NO: 16151 - DNA, 80 bp, synthetic construct
  misc_feature 1..80: note = Synthetic: >MN307884-cand-560-639
  source 1..80: mol_type = other DNA
cagaggagtgtcgttcttgttgccaaagacattcccgaacaactctgtgacgctttgtttttctatacgtcacacaaccc

SEQ ID NO: 16152 - DNA, 80 bp, synthetic construct
  misc_feature 1..80: note = Synthetic: >MT114538-cand-23660-23739
  source 1..80: mol_type = other DNA
cagcgcttaatgcatttgtgtctcagactctaaccagacaagcagaggttagggctagtagacaacttgccaaagacaag

SEQ ID NO: 16153 - DNA, 80 bp, synthetic construct
  misc_feature 1..80: note = Synthetic: >NC_028752-cand-80-159
  source 1..80: mol_type = other DNA
tacggccggcatctctgatgctggagtcgtggcgtaattgaaatttcatttgggttgcaacagtttggaaataagtgctg

SEQ ID NO: 16154 - DNA, 80 bp, synthetic construct
  misc_feature 1..80: note = Synthetic: >MT114541-cand-21200-21279
  source 1..80: mol_type = other DNA
cagtattttcactgactacaataggtggtgttactcttgagatttcttgttataatgatacagtgagtgagtcaagtttc

SEQ ID NO: 16155 - DNA, 80 bp, synthetic construct
  misc_feature 1..80: note = Synthetic: >MT114542-cand-21260-21339
  source 1..80: mol_type = other DNA
cagtgttctcactgactacaacaggtggtgtcattcttgagatttcttgttataatgataccgtgagtgagtcaagtttc

SEQ ID NO: 16156 - DNA, 80 bp, synthetic construct
  misc_feature 1..80: note = Synthetic: >SBB-797-cand-6800-6879
  source 1..80: mol_type = other DNA
tagttccattcactagtatgttgcgcatgtatatagttattgcctttttgtggttgtgctataaaggttttgttcatgta

SEQ ID NO: 16157 - DNA, 80 bp, synthetic construct
  misc_feature 1..80: note = Synthetic: >SBB-726-cand-6810-6889
  source 1..80: mol_type = other DNA
cactagtatgttgcgcatgtatatagttattgcctttttgtggttgtgctataaaggttttgttcatgtaaggtatggtt

SEQ ID NO: 16158 - DNA, 80 bp, synthetic construct
  misc_feature 1..80: note = Synthetic: >SBB-130-cand-15280-15359
  source 1..80: mol_type = other DNA
acaagtcataagttcatactagctataacaccctacgtttgctgtgtttctggctgtactgttaatgatgttacgcgttt

SEQ ID NO: 16159 - DNA, 80 bp, synthetic construct
  misc_feature 1..80: note = Synthetic: >SBB-122-cand-15280-15359
  source 1..80: mol_type = other DNA
tcgacaagtcataagttcatactagctataacaccttatgtttgttgtgtttctggctgtactgttaatgatgttacgcg

SEQ ID NO: 16160 - DNA, 80 bp, synthetic construct
  misc_feature 1..80: note = Synthetic: >SBB-797-cand-13600-13679
  source 1..80: mol_type = other DNA
ctgctgagtgtcatgtagatggcgactttagtaagccgaagcgcgtttgggacatatgtaaatatgactacacgcagttt

SEQ ID NO: 16161 - DNA, 80 bp, synthetic construct
  misc_feature 1..80: note = Synthetic: >SBB-747-cand-13590-13669
  source 1..80: mol_type = other DNA
gatatgttggctgctgagtgtcatgtagatggcgatttcagtaagccgaagcgtgtttgggacatatgtaaatatgacta

SEQ ID NO: 16162 - DNA, 80 bp, synthetic construct
  misc_feature 1..80: note = Synthetic: >SBB-024-cand-4520-4599
  source 1..80: mol_type = other DNA
aaactggatagtgcactagaagttacccctgttgtgctacctaaaccattcaggagcgatggtaggtttgatttttatga

SEQ ID NO: 16163 - DNA, 80 bp, synthetic construct
  misc_feature 1..80: note = Synthetic: >SBB-130-cand-4510-4589
  source 1..80: mol_type = other DNA
agttgctaaactggatagtgcactagaagttacccctgttgtgctacctaaaccattcaggagcgatggtaggtttgatt

SEQ ID NO: 16164 - DNA, 80 bp, synthetic construct
  misc_feature 1..80: note = Synthetic: >SBB-747-cand-5590-5669
  source 1..80: mol_type = other DNA
ctaactatgtaccctaacatagctggtgatgtagtggccatttcagatgataatgtgactgcccatccatatggttcttt

SEQ ID NO: 16165 - DNA, 80 bp, synthetic construct
  misc_feature 1..80: note = Synthetic: >SBB-797-cand-2480-2559
  source 1..80: mol_type = other DNA
tctatcgttacgttaaatcaggtggtgtcttatctaaggcatttagactacgtggcggtggacctggtaaggtaaccttt

SEQ ID NO: 16166 - DNA, 80 bp, synthetic construct
  misc_feature 1..80: note = Synthetic: >SBB-747-cand-2470-2549
  source 1..80: mol_type = other DNA
gatggtttgttctatcgttacgttaaatcaggtggtgttttatctaaggcatttagattacgtggcggtggacctggtaa

SEQ ID NO: 16167 - DNA, 80 bp, synthetic construct
  misc_feature 1..80: note = Synthetic: >SBB-024-cand-8000-8079
  source 1..80: mol_type = other DNA
tttgctactaaaagtgtgtttgcagactcgtctacttgttatgatatcactggtcctgctagtccagctcagtgtgtgtt

SEQ ID NO: 16168 - DNA, 80 bp, synthetic construct
  misc_feature 1..80: note = Synthetic: >SBB-010-cand-8010-8089
  source 1..80: mol_type = other DNA
aaagtgtgtttgcagactcgtctacttgttatgatatcactggtcctgctagtccggctcagtgtgtgttcaatgctgcc

SEQ ID NO: 16169 - DNA, 80 bp, synthetic construct
  misc_feature 1..80: note = Synthetic: >SBB-122-cand-7990-8069
  source 1..80: mol_type = other DNA
aaccttggtgtttgccactaaaagtgtgtttgcagactcgtctacttgttatgatatcactggtcctgctagtccagctc

SEQ ID NO: 16170 - DNA, 80 bp, synthetic construct
  misc_feature 1..80: note = Synthetic: >SBB-120-cand-11840-11919
  source 1..80: mol_type = other DNA
tgtaacactatagagttagagcctccatgtaagtttgctgtggacactacaaatggtactgctattaagtacttgtattt

SEQ ID NO: 16171 - DNA, 80 bp, synthetic construct
  misc_feature 1..80: note = Synthetic: >SBB-130-cand-11830-11909
  source 1..80: mol_type = other DNA
tggtggttgtaacactatagagttagagcctccatgtaagtttgctgtggacactacaaatggtactgctattaagtact

SEQ ID NO: 16172 - DNA, 80 bp, synthetic construct
  misc_feature 1..80: note = Synthetic: >SBB-024-cand-11830-11909
  source 1..80: mol_type = other DNA
tgatggtggttgtaacactatagagttagagcctccgtgtaagtttgctgtggacactacaaatggtactgctattaagt

SEQ ID NO: 16173 - DNA, 80 bp, synthetic construct
  misc_feature 1..80: note = Synthetic: >SBB-122-cand-11840-11919
  source 1..80: mol_type = other DNA
tgtaacactattgagttggagcctccatgtaagtttgctgtggacactacaaatggtactgctattaagtatttgtactt

SEQ ID NO: 16174 - DNA, 80 bp, synthetic construct
  misc_feature 1..80: note = Synthetic: >SBB-747-cand-12390-12469
  source 1..80: mol_type = other DNA
cacagttttgggtactttagcttgcactgttaggttacatgcaggttcggctacagaagttgcaagtaactcgtctattt

SEQ ID NO: 16175 - DNA, 80 bp, synthetic construct
  misc_feature 1..80: note = Synthetic: >SBB-797-cand-12400-12479
  source 1..80: mol_type = other DNA
ggtactttagcttgcactgttagattacatgcaggttcggctacagaagttgcaagtaactcgtctattttatccttatg

SEQ ID NO: 16176 - DNA, 80 bp, synthetic construct
  misc_feature 1..80: note = Synthetic: >SBB-747-cand-10950-11029
  source 1..80: mol_type = other DNA
tgttggatatttagacccctcattgttgttactgtatggtaagtttaggtgtgtgttagtttgctatttagtggtgggtt

SEQ ID NO: 16177 - DNA, 80 bp, synthetic construct
  misc_feature 1..80: note = Synthetic: >SBB-788-cand-10960-11039
  source 1..80: mol_type = other DNA
gtagacccctcattgttgttactgtatggtaagtttaggtgtgtgttagtttgctatttagtggtgggttacttttgcac

SEQ ID NO: 16178 - DNA, 80 bp, synthetic construct
  misc_feature 1..80: note = Synthetic: >SBB-797-cand-6400-6479
  source 1..80: mol_type = other DNA
atttggtttgtttggacatgcttagttataacaggtgtttggttatctgaaccttacactatgagtataattagtaggtt

SEQ ID NO: 16179 - DNA, 80 bp, synthetic construct
  misc_feature 1..80: note = Synthetic: >SBB-726-cand-6410-6489
  source 1..80: mol_type = other DNA
tttggacatgcttagttataacaggtgtttggttatctgaaccttacactatgagtataattagtaggtttaaacagttc

SEQ ID NO: 16180 - DNA, 80 bp, synthetic construct
  misc_feature 1..80: note = Synthetic: >SBB-747-cand-6390-6469
  source 1..80: mol_type = other DNA
tgtgctttatatctggtttgtttggacatgcttagttataataggtgtttggttatctgaaccttacactatgagtataa

SEQ ID NO: 16181 - DNA, 80 bp, synthetic construct
  misc_feature 1..80: note = Synthetic: >SBB-130-cand-9460-9539
  source 1..80: mol_type = other DNA
tggtgtctatggcgttacattacgcactaatagcactataaagggctctttcataaatggggcttgtggctcgccaggtt

SEQ ID NO: 16182 - DNA, 80 bp, synthetic construct
  misc_feature 1..80: note = Synthetic: >SBB-053-cand-9470-9549
  source 1..80: mol_type = other DNA
tatggcgttacattacgcactaatagcactataaagggctctttcataaatggggcttgtggctcgccaggttacaacat

SEQ ID NO: 16183 - DNA, 80 bp, synthetic construct
  misc_feature 1..80: note = Synthetic: >SBB-010-cand-9470-9549
  source 1..80: mol_type = other DNA
tatggcgttacattacgcactaatagcactataaagggttcttttataaatggagcctgtggttcaccaggttacaacat

SEQ ID NO: 16184 - DNA, 80 bp, synthetic construct
  misc_feature 1..80: note = Synthetic: >SBB-788-cand-8000-8079
  source 1..80: mol_type = other DNA
aacgtgttttgtgctatatctttatgttactggtggtgttgaaccctcagtggtttacgccatggtacatattgagacct

SEQ ID NO: 16185 - DNA, 80 bp, synthetic construct
  misc_feature 1..80: note = Synthetic: >SBB-726-cand-8010-8089
  source 1..80: mol_type = other DNA
gtgctatatctttatgttactggtggtgttgaaccctcagtggtttacgccatggtacatattgagacctattgattata

SEQ ID NO: 16186 - DNA, 80 bp, synthetic construct
  misc_feature 1..80: note = Synthetic: >SBB-747-cand-7990-8069
  source 1..80: mol_type = other DNA
gtgcagtggaaacgtgttttgtgctatatctttatgttactggtggtgttgaaccctcagtggtttacgccatggtacat

SEQ ID NO: 16187 - DNA, 80 bp, synthetic construct
  misc_feature 1..80: note = Synthetic: >SBB-747-cand-2710-2789
  source 1..80: mol_type = other DNA
caacaggcagtttatgaaaaactgtctgatttattttctgaatgcccagcagagctccgacctatagatttagaggagtt

SEQ ID NO: 16188 - DNA, 80 bp, synthetic construct
  misc_feature 1..80: note = Synthetic: >PDF-2370-cand-1600-1679
  source 1..80: mol_type = other DNA
cgacctgctccagattttgaatcgggagaaggtcgttgttaacatagttggtgacttctgtctgaatgaagaagttgcta

SEQ ID NO: 16189 - DNA, 80 bp, synthetic construct
  misc_feature 1..80: note = Synthetic: >SBB-747-cand-15670-15749
  source 1..80: mol_type = other DNA
cgcaaacatctttaaggtgtggcggttgcatacgcagaccttttctctgctgtaagtgttgttatgaccatgtggtgtca

SEQ ID NO: 16190 - DNA, 80 bp, synthetic construct
  misc_feature 1..80: note = Synthetic: >SBB-788-cand-15680-15759
  source 1..80: mol_type = other DNA
tttaaggtgtggcggttgcatacgcagaccttttctctgctgtaagtgttgttatgatcatgtggtgtcaactacgcaca

SEQ ID NO: 16191 - DNA, 80 bp, synthetic construct
  misc_feature 1..80: note = Synthetic: >PRD-0038-cand-16070-16149
  source 1..80: mol_type = other DNA
cgcacacagtcttacaggctgtgggtgcttgtgtattgtgtaactcacagacttcattaagatgcggcgcttgcattaga

SEQ ID NO: 16192 - DNA, 80 bp, synthetic construct
  misc_feature 1..80: note = Synthetic: >PDF-2386-cand-16080-16159
  source 1..80: mol_type = other DNA
cttacaggctgtgggtgcttgtgtattgtgtaactcacagacttcattaagatgcggcgcttgcattagaagaccatttc

SEQ ID NO: 16193 - DNA, 80 bp, synthetic construct
  misc_feature 1..80: note = Synthetic: >SBB-130-cand-9220-9299
  source 1..80: mol_type = other DNA
gatagcttcatccactacaagtcatatagattatgaccatgaatactccataatgcgcttgcataacttctcaatatccg

SEQ ID NO: 16194 - DNA, 80 bp, synthetic construct
  misc_feature 1..80: note = Synthetic: >SBB-053-cand-9230-9309
  source 1..80: mol_type = other DNA
tcatccactacaagtcatatagattatgaccatgaatactccataatgcgcttgcataacttctcaatatccgtaggtaa

SEQ ID NO: 16195 - DNA, 80 bp, synthetic construct
  misc_feature 1..80: note = Synthetic: >PDF-2386-cand-15360-15439
  source 1..80: mol_type = other DNA
taatagtgtttttaacatatgtcaggccgtgactgctaatgtaaatgcacttttatctactgatggtaacaaaattgccg

SEQ ID NO: 16196 - DNA, 80 bp, synthetic construct
  misc_feature 1..80: note = Synthetic: >PRD-0038-cand-15350-15429
  source 1..80: mol_type = other DNA
ctgcttatgctaatagtgtttttaacatatgtcaggccgtgactgctaatgtaaatgcacttttatctactgatggtaac

SEQ ID NO: 16197 - DNA, 80 bp, synthetic construct
  misc_feature 1..80: note = Synthetic: >PRD-0038-cand-15750-15829
  source 1..80: mol_type = other DNA
taaacaaggagatgattatgtgtacttgccctacccagatccttctagaattttaggcgcaggctgttttgtcgatgata

SEQ ID NO: 16198 - DNA, 80 bp, synthetic construct
  misc_feature 1..80: note = Synthetic: >SBB-010-cand-11720-11799
  source 1..80: mol_type = other DNA
gatggctttgtgtctgatggtaaggccctttacaataatgagtctggtaagacttttatgtatgcctttatagcagacaa

SEQ ID NO: 16199 - DNA, 80 bp, synthetic construct
  misc_feature 1..80: note = Synthetic: >SBB-041-cand-11710-11789
  source 1..80: mol_type = other DNA
ggcagaaggtgatggctttgtgtctgatggtaaggctctttacaataatgagtctggtaagacttttatgtatgccttta

SEQ ID NO: 16200 - DNA, 80 bp, synthetic construct
  misc_feature 1..80: note = Synthetic: >SBB-010-cand-3470-3549
  source 1..80: mol_type = other DNA
gcatctacgttagtgcacctgcagttgttggattgttttgacgacccagcctttgacttgttcaaggttggtcgtgttgc

SEQ ID NO: 16201 - DNA, 80 bp, synthetic construct
  misc_feature 1..80: note = Synthetic: >SBB-053-cand-3480-3559
  source 1..80: mol_type = other DNA
tagtgcacctgcagttgttggattgttttgacgatccagcctttgacttgttcaaggttggtcgtgttgcacccatggta

SEQ ID NO: 16202 - DNA, 80 bp, synthetic construct
  misc_feature 1..80: note = Synthetic: >PRD-0038-cand-800-879
  source 1..80: mol_type = other DNA
tacactcgctatgtagatagcaacttctgtggtccagatggataccctctggattgtataaaagaattgcttgcacgtgc

SEQ ID NO: 16203 - DNA, 80 bp, synthetic construct
  misc_feature 1..80: note = Synthetic: >SBB-797-cand-24560-24639
  source 1..80: mol_type = other DNA
ggcttgctatgatagctggtctagttggtttagctctagcagtggtcatgctactatgtatgactaattgttgttcatgc

SEQ ID NO: 16204 - DNA, 80 bp, synthetic construct
  misc_feature 1..80: note = Synthetic: >SBB-788-cand-24560-24639
  source 1..80: mol_type = other DNA
tatggcttgctatgatagctggcctagttggtttagctctagcagtggtcatgctattatgtatgactaattgttgttca

SEQ ID NO: 16205 - DNA, 80 bp, synthetic construct
  misc_feature 1..80: note = Synthetic: >PRD-0038-cand-20150-20229
  source 1..80: mol_type = other DNA
ttgaaggctatgcttttgagcatatcgtgtatggtgactttagccacggacagttaggaggtctacatttattgataggc

SEQ ID NO: 16206 - DNA, 80 bp, synthetic construct
  misc_feature 1..80: note = Synthetic: >SBB-747-cand-15350-15429
  source 1..80: mol_type = other DNA
tagaattttgggagctggttgttttgtggatgacttgttgaagacagatggtactctcatgatggagcggtatgtgtcac

SEQ ID NO: 16207 - DNA, 80 bp, synthetic construct
  misc_feature 1..80: note = Synthetic: >SBB-797-cand-15360-15439
  source 1..80: mol_type = other DNA
ggagctggttgttttgtggatgacttgttgaagacagatggtactcttatgatggagcggtatgtgtcacttgctattga

SEQ ID NO: 16208 - DNA, 80 bp, synthetic construct
  misc_feature 1..80: note = Synthetic: >SBB-010-cand-11320-11399
  source 1..80: mol_type = other DNA
gtctaaggttatcagtgcaatgcattcattactttttggcatgttgcgtaaacttgatatgtctagtgtagacactatcc

SEQ ID NO: 16209 - DNA, 80 bp, synthetic construct
  misc_feature 1..80: note = Synthetic: >SBB-041-cand-11310-11389
  source 1..80: mol_type = other DNA
ttaataggaagtctaaggttatcagtgcaatgcattcattactttttggcatgttgcgtaaacttgatatgtctagtgta

SEQ ID NO: 16210 - DNA, 80 bp, synthetic construct
  misc_feature 1..80: note = Synthetic: >PDF-2386-cand-12160-12239
  source 1..80: mol_type = other DNA
ggcaaggtctgaagataagagggctaaagttactagtgcaatgcaaactatgcttttcactatgcttagaaaacttgata

SEQ ID NO: 16211 - DNA, 80 bp, synthetic construct
  misc_feature 1..80: note = Synthetic: >PDF-2370-cand-1360-1439
  source 1..80: mol_type = other DNA
ggcttgtcctgcttgtcaaaacccaaaggtggggcctgatcatagtgtggcagattaccataaccattcagggatcaaaa

SEQ ID NO: 16212 - DNA, 80 bp, synthetic construct
  misc_feature 1..80: note = Synthetic: >PDF-2386-cand-5600-5679
  source 1..80: mol_type = other DNA
ggtaactaccagtgtggtcattatactcatatagtaaacaaagaaacactttataaaattgatggtgctttgttgacaaa

SEQ ID NO: 16213 - DNA, 80 bp, synthetic construct
  misc_feature 1..80: note = Synthetic: >229E-cand-7680-7759
  source 1..80: mol_type = other DNA
aaagctaagggcttgactttcttgttgacaattaatgaaaaccaagctgttacacaaatacctgcaactagcattgttgc

SEQ ID NO: 16214 - DNA, 80 bp, synthetic construct
  misc_feature 1..80: note = Synthetic: >229E-cand-7760-7839
  source 1..80: mol_type = other DNA
taagcaaggtgctggtgatgctggccattcatcaacatggttgtggctactttgtggtcttgtgtgtttgattcaattct

SEQ ID NO: 16215 - DNA, 80 bp, synthetic construct
  misc_feature 1..80: note = Synthetic: >229E-cand-7840-7919
  source 1..80: mol_type = other DNA
atttgtgttttttcatgccctactttatgcacgataccgttcgtagttttgagggttatgattttaaatatatagaaaat

SEQ ID NO: 16216 - DNA, 80 bp, synthetic construct
  misc_feature 1..80: note = Synthetic: >229E-cand-7920-7999
  source 1..80: mol_type = other DNA
ggtcagttgaagaattttgaagctccacttaaatgtgtcagaaatgtttttgaaaattttgaggattggcattatgctaa

SEQ ID NO: 16217 - DNA, 80 bp, synthetic construct
  misc_feature 1..80: note = Synthetic: >229E-cand-8000-8079
  source 1..80: mol_type = other DNA
gtttggctttatacctttaaacaagcaaagctgtcctattgtagttggagtttctgaaattgttaacactgttgctggta

SEQ ID NO: 16218 - DNA, 80 bp, synthetic construct
  misc_feature 1..80: note = Synthetic: >229E-cand-8080-8159
  source 1..80: mol_type = other DNA
ttccatctaatgtgtatcttgttggtaaaactttaatttttacactacaagctgcttttggtaatgctggtgtttgttat

SEQ ID NO: 16219 - DNA, 80 bp, synthetic construct
  misc_feature 1..80: note = Synthetic: >229E-cand-8160-8239
  source 1..80: mol_type = other DNA
gacatttttggcgtcacaacacctgaaaagtgcatttttacttctgcttgtactagattggaaggtttgggtggtaacaa

SEQ ID NO: 16220 - DNA, 80 bp, synthetic construct
  misc_feature 1..80: note = Synthetic: >229E-cand-8240-8319
  source 1..80: mol_type = other DNA
tgtttattgttataacacagatcttatggaaggttcattgccttacagttcaatacaagctaacgcatattataaatatg

SEQ ID NO: 16221 - DNA, 80 bp, synthetic construct
  misc_feature 1..80: note = Synthetic: >229E-cand-8320-8399
  source 1..80: mol_type = other DNA
acaatggtaattttattaagttgccagaagttattgcacaaggctttgggtttagaacagtgcgtactattgctaccaaa

SEQ ID NO: 16222 - DNA, 80 bp, synthetic construct
  misc_feature 1..80: note = Synthetic: >229E-cand-8400-8479
  source 1..80: mol_type = other DNA
tattgccgtgtaggtgagtgtgttgactccaatgcaggtgtgtgttttggctttgacaagtggtttgttaatgatggacg

SEQ ID NO: 16223 - DNA, 80 bp, synthetic construct
  misc_feature 1..80: note = Synthetic: >229E-cand-8480-8559
  source 1..80: mol_type = other DNA
tgttgacaatggttatgtttgtggtactggtttgtggaaccttgtatttaacatactttccatgttttcatcttcatttt

SEQ ID NO: 16224 - DNA, 80 bp, synthetic construct
  misc_feature 1..80: note = Synthetic: >229E-cand-8560-8639
  source 1..80: mol_type = other DNA
ctgttgctgcaatgtcaggccaaattttacttaattgtgcattaggtgctttcgcaatcttttgttgttttctcgtgaca

SEQ ID NO: 16225 - DNA, 80 bp, synthetic construct
  misc_feature 1..80: note = Synthetic: >229E-cand-8640-8719
  source 1..80: mol_type = other DNA
aaatttagacgtatgtttggtgatctttctgtgggtgtttgcactgttgttatggctgttctgcttaacaatgtttcata

SEQ ID NO: 16226 - DNA, 80 bp, synthetic construct
  misc_feature 1..80: note = Synthetic: >229E-cand-8720-8799
  source 1..80: mol_type = other DNA
cattgtaactcagaacttagtaacaatgattgcatatgctgtgttgtacttctttgctactagaagtttgcgctacgcat

SEQ ID NO: 16227 - DNA, 80 bp, synthetic construct
  misc_feature 1..80: note = Synthetic: >229E-cand-8800-8879
  source 1..80: mol_type = other DNA
ggatttggtgtgctgcatatttaattgcatacatatcttttgccccatggtggctgtgtgcttggtactttcttgctatg

SEQ ID NO: 16228 - DNA, 80 bp, synthetic construct
  misc_feature 1..80: note = Synthetic: >229E-cand-8880-8959
  source 1..80: mol_type = other DNA
ttaacaggtcttttacctagtttgttgaagcttaaagtctcgacaaacctttttgagggtgacaaatttgtaggtacatt

SEQ ID NO: 16229 - DNA, 80 bp, synthetic construct
  misc_feature 1..80: note = Synthetic: >AlphaCoV1-cand-16030-16109
  source 1..80: mol_type = other DNA
ggtgaatttgtgtttgagcaatctgagtacggtagtgattctgtttattacaagagtactagtacttataaactgacacc

SEQ ID NO: 16230 - DNA, 80 bp, synthetic construct
  misc_feature 1..80: note = Synthetic: >AlphaCoV1-cand-16110-16189
  source 1..80: mol_type = other DNA
aggtatgatttttgtgttgacttctcataatgtgagtccacttaaagctacaattttagtcaaccaagaaaagtacaata

SEQ ID NO: 16231 - DNA, 80 bp, synthetic construct
  misc_feature 1..80: note = Synthetic: >AlphaCoV1-cand-16190-16269
  source 1..80: mol_type = other DNA
ccatatctaagctctatcctgtgtttaatatagcggaagcctataacacactggtgccttactatcaaatgataggtaag

SEQ ID NO: 16232 - DNA, 80 bp, synthetic construct
  misc_feature 1..80: note = Synthetic: >AlphaCoV1-cand-16270-16349
  source 1..80: mol_type = other DNA
caaaaatttacaactatccaaggtcctcctggtagcggtaaatctcattgtgttataggtttgggtttgtattatcctca

SEQ ID NO: 16233 - DNA, 80 bp, synthetic construct
  misc_feature 1..80: note = Synthetic: >AlphaCoV1-cand-16350-16429
  source 1..80: mol_type = other DNA
ggctagaatagtctacacagcatgttcacatgcagctgtggatgctttatgtgaaaaagctgccaagaacttcaatgttg

SEQ ID NO: 16234 - DNA, 80 bp, synthetic construct
  misc_feature 1..80: note = Synthetic: >AlphaCoV1-cand-16430-16509
  source 1..80: mol_type = other DNA
atagatgttcaaggataatacctcaaagaatcagagttgattgttatacgggttttaagcctaataacaccaatgcacag

SEQ ID NO: 16235 - DNA, 80 bp, synthetic construct
  misc_feature 1..80: note = Synthetic: >AlphaCoV1-cand-16510-16589
  source 1..80: mol_type = other DNA
tacttgttttgtactgttaatgctttaccagaagcaagttgtgacattgttgtagtggatgaggtctctatgtgtactaa

SEQ ID NO: 16236 - DNA, 80 bp, synthetic construct
  misc_feature 1..80: note = Synthetic: >AlphaCoV1-cand-16590-16669
  source 1..80: mol_type = other DNA
ttatgatcttagtgtcataaatagtagactgagttacaaacatattgtttatgttggagacccacaacaactaccagctc

SEQ ID NO: 16237 - DNA, 80 bp, synthetic construct
  misc_feature 1..80: note = Synthetic: >AlphaCoV1-cand-16670-16749
  source 1..80: mol_type = other DNA
ctagaaccttgattaataagggtgtacttcaacctcaggattacaatgttgtaacccaaagaatgtgcacactaggacct

SEQ ID NO: 16238 - DNA, 80 bp, synthetic construct
  misc_feature 1..80: note = Synthetic: >AlphaCoV1-cand-16750-16829
  source 1..80: mol_type = other DNA
gatgtctttttgcataaatgttacagatgcccagctgaaattgttaagacagtctctgcacttgtttatgaaaataaatt

SEQ ID NO: 16239 - DNA, 80 bp, synthetic construct
  misc_feature 1..80: note = Synthetic: >AlphaCoV1-cand-16830-16909
  source 1..80: mol_type = other DNA
tgtacctgtcaacccagaatcaaagcagtgcttcaaaatgtttgtaaaaggtcaggttcagattgaatctaactcttcta

SEQ ID NO: 16240 - DNA, 80 bp, synthetic construct
  misc_feature 1..80: note = Synthetic: >AlphaCoV1-cand-16910-16989
  source 1..80: mol_type = other DNA
taaacaacaagcaactagaggttgtcaaggcatttttagcacataatccaaaatggcgtaaagctgttttcatctcaccc

SEQ ID NO: 16241 - DNA, 80 bp, synthetic construct
  misc_feature 1..80: note = Synthetic: >AlphaCoV1-cand-16990-17069
  source 1..80: mol_type = other DNA
tataatagtcaaaattatgttgctcgacgtcttcttggtttgcaaacgcaaactgtagactctgctcagggtagtgagta

SEQ ID NO: 16242 - DNA, 80 bp, synthetic construct
  misc_feature 1..80: note = Synthetic: >AlphaCoV1-cand-17070-17149
  source 1..80: mol_type = other DNA
tgattatgtcatttacacacagacctccgatacacagcatgctactaatgtcaacagatttaatgttgccattactagag

SEQ ID NO: 16243 - DNA, 80 bp, synthetic construct
  misc_feature 1..80: note = Synthetic: >AlphaCoV1-cand-17150-17229
  source 1..80: mol_type = other DNA
caaaggttggtatactttgtatcatgtgtgatagaacgatgtatgagaatcttgatttctatgaactcaaagattcaaag

SEQ ID NO: 16244 - DNA, 80 bp, synthetic construct
  misc_feature 1..80: note = Synthetic: >AlphaCoV1-cand-17230-17309
  source 1..80: mol_type = other DNA
attggcttacaagcaaaacctgaaacttgtggtttgtttaaagattgttcaaagaacgaacaatacataccacctgcata

SEQ ID NO: 16245 - DNA, 80 bp, synthetic construct
  misc_feature 1..80: note = Synthetic: >AlphaCoV1-cand-21150-21229
  source 1..80: mol_type = other DNA
ttcatggaaacccatactacatcctacttatggttttacaagatgacgttcacgacaatccgcaattttaatcctgctgt

SEQ ID NO: 16246 - DNA, 80 bp, synthetic construct
  misc_feature 1..80: note = Synthetic: >AlphaCoV1-cand-21230-21309
  source 1..80: mol_type = other DNA
aggtgttataatatgcatttggaattgtaaggataacccgacgggcaagatagcataagctcctaccaccaatttagtgt

SEQ ID NO: 16247 - DNA, 80 bp, synthetic construct
  misc_feature 1..80: note = Synthetic: >AlphaCoV1-cand-21310-21389
  source 1..80: mol_type = other DNA
taatctaggttatggtgcataattgtgtttttaagcagagattatcacttattcaccaccaaccagtgaagttccctata

SEQ ID NO: 16248 - DNA, 80 bp, synthetic construct
  misc_feature 1..80: note = Synthetic: >AlphaCoV1-cand-21390-21469
  source 1..80: mol_type = other DNA
tgtgggtgatgacagaaaaattcctccttctaattcagaggcaagacactggattgacagctaataagttctatggcttc

SEQ ID NO: 16249 - DNA, 80 bp, synthetic construct
  misc_feature 1..80: note = Synthetic: >AlphaCoV1-cand-21470-21549
  source 1..80: mol_type = other DNA
cagtggactgatgattatgttgacgcttatttaggtggtactatttataatgttagggttgaaaatgattggtctgtcat

SEQ ID NO: 16250 - DNA, 80 bp, synthetic construct
  misc_feature 1..80: note = Synthetic: >AlphaCoV1-cand-21550-21629
  source 1..80: mol_type = other DNA
tgaagtcacaatttcttataagcgggcgagcactgctacattagaaaacagtgttacgtatggataccataggcaatttt

SEQ ID NO: 16251 - DNA, 80 bp, synthetic construct
  misc_feature 1..80: note = Synthetic: >AlphaCoV1-cand-21630-21709
  source 1..80: mol_type = other DNA
aatcctgtttatcacatcacttattatacttttaataatactaatggttcaaatactaccgaattgcagttgtttctgag

SEQ ID NO: 16252 - DNA, 80 bp, synthetic construct
  misc_feature 1..80: note = Synthetic: >AlphaCoV1-cand-21710-21789
  source 1..80: mol_type = other DNA
tgcaatgatcactattgtgctggttatgctactaatgtctttgttccacagctaggaggttatataccagaaggttttag

SEQ ID NO: 16253 - DNA, 80 bp, synthetic construct
  misc_feature 1..80: note = Synthetic: >AlphaCoV1-cand-21790-21869
  source 1..80: mol_type = other DNA
ttttaataattggtttctgctaacaaataaatccactttggttaatggtagatttgttactaaacagccattatttgtta

SEQ ID NO: 16254 - DNA, 80 bp, synthetic construct
  misc_feature 1..80: note = Synthetic: >AlphaCoV1-cand-21870-21949
  source 1..80: mol_type = other DNA
attgtttatggccagtgcctagctttgaagaagcagcctaaaaattttgttttgatggtgctgacttttatcaatgtaat

SEQ ID NO: 16255 - DNA, 80 bp, synthetic construct
  misc_feature 1..80: note = Synthetic: >AlphaCoV1-cand-21950-22029
  source 1..80: mol_type = other DNA
ggtgtctgtctaaataatacagtagatgttatgaggttcaaccttaattttactacaaatgtacaatcaggtaagggtgc

SEQ ID NO: 16256 - DNA, 80 bp, synthetic construct
  misc_feature 1..80: note = Synthetic: >AlphaCoV1-cand-22020-22099
  source 1..80: mol_type = other DNA
gtaagggtgccacagttttttcaatgaatacaactggtggtgtccagttgtatttcacatttgaagataatacaactctt

SEQ ID NO: 16257 - DNA, 80 bp, synthetic construct
  misc_feature 1..80: note = Synthetic: >AlphaCoV1-cand-22100-22179
  source 1..80: mol_type = other DNA
gaaatatcatgttatagtaatgctacagtgagtgactccagctcttccagttacggtgtctctcaaattccgttcggcat

SEQ ID NO: 16258 - DNA, 80 bp, synthetic construct
  misc_feature 1..80: note = Synthetic: >AlphaCoV1-cand-22180-22259
  source 1..80: mol_type = other DNA
aactgatggaccacggtactgttatgtacactataatggcacagctcttagcagacagtttttaggaatattaccaccaa

SEQ ID NO: 16259 - DNA, 80 bp, synthetic construct
  misc_feature 1..80: note = Synthetic: >AlphaCoV1-cand-22260-22339
  source 1..80: mol_type = other DNA
gtgtcaaggagattgctattagtaagtggggccatttttatattaatggttacaattactttagcacatttcctattgat

SEQ ID NO: 16260 - DNA, 80 bp, synthetic construct
  misc_feature 1..80: note = Synthetic: >AlphaCoV1-cand-22340-22419
  source 1..80: mol_type = other DNA
tgtatatcttttaatttcaccactggtgctagtgagaagtatggtttttggacaatagcttacacatcgtacactgatgt

SEQ ID NO: 16261 - DNA, 80 bp, synthetic construct
  misc_feature 1..80: note = Synthetic: >AlphaCoV1-cand-23700-23779
  source 1..80: mol_type = other DNA
aggtatgtttgtaatggtaaccctagttgtaacaaattgttaacacaatacatttctgcatgtcaaactattgaacaagc

SEQ ID NO: 16262 - DNA, 80 bp, synthetic construct
  misc_feature 1..80: note = Synthetic: >AlphaCoV1-cand-23780-23859
  source 1..80: mol_type = other DNA
acttgcaatgggtgccagacttgaaactatggagcttgattccatgttttctgtttcagaaaatgcccttaaattggcat

SEQ ID NO: 16263 - DNA, 80 bp, synthetic construct
  misc_feature 1..80: note = Synthetic: >AlphaCoV1-cand-23860-23939
  source 1..80: mol_type = other DNA
ctgttgaagcattcaatagtacagaaactttagatcctatttacaaagaatggcctaatactataggtggttcttagtta

SEQ ID NO: 16264 - DNA, 80 bp, synthetic construct
  misc_feature 1..80: note = Synthetic: >AlphaCoV1-cand-23940-24019
  source 1..80: mol_type = other DNA
gaaggtctaaaagatatactaccgtcccataatagcaaacgtaagtatcgttctgctatagaggatttgctttttaataa

SEQ ID NO: 16265 - DNA, 80 bp, synthetic construct
  misc_feature 1..80: note = Synthetic: >AlphaCoV1-cand-24020-24099
  source 1..80: mol_type = other DNA
ggttgtaactactggtctaggtacagttgatgaagattataaacgttgtacaggtggttatgacatagctgacttagtgt

SEQ ID NO: 16266 - DNA, 80 bp, synthetic construct
  misc_feature 1..80: note = Synthetic: >AlphaCoV1-cand-24100-24179
  source 1..80: mol_type = other DNA
gtgctcaatattacaatggcatcatggttctacctggtgtggctaatgatgacaagatgactatgtacacagcatcccta

SEQ ID NO: 16267 - DNA, 80 bp, synthetic construct
  misc_feature 1..80: note = Synthetic: >AlphaCoV1-cand-24180-24259
  source 1..80: mol_type = other DNA
gcaggtggtataacattaggtgcacttggtggaggtgccgtggctataccttttgcaatagcagttcaggctagacttaa

SEQ ID NO: 16268 - DNA, 80 bp, synthetic construct
  misc_feature 1..80: note = Synthetic: >AlphaCoV1-cand-24260-24339
  source 1..80: mol_type = other DNA
ttatgttgctctacaaactgatgtattacagaaaaaccagcagatactggctaatgcttttaatcaagctattggtaaca

SEQ ID NO: 16269 - DNA, 80 bp, synthetic construct
  misc_feature 1..80: note = Synthetic: >AlphaCoV1-cand-24340-24419
  source 1..80: mol_type = other DNA
ttacacaggcatttggtaaggttaatgatgctatacatcaaacatcacaaggtcttgctactgttgctaaagcattgact

SEQ ID NO: 16270 - DNA, 80 bp, synthetic construct
  misc_feature 1..80: note = Synthetic: >AlphaCoV1-cand-24420-24499
  source 1..80: mol_type = other DNA
aaagtgcaagatgttgttaataaacaaggtcaagctttaagccaccttacagtacaattgcaaaataatttccaagccat

SEQ ID NO: 16271 - DNA, 80 bp, synthetic construct
  misc_feature 1..80: note = Synthetic: >AlphaCoV1-cand-24500-24579
  source 1..80: mol_type = other DNA
tagtagttctattagtgaaatttataataggcttgaagaagtgaatgctgatgcacaagttgacaggctgattacaggaa

SEQ ID NO: 16272 - DNA, 80 bp, synthetic construct
  misc_feature 1..80: note = Synthetic: >AlphaCoV1-cand-24580-24659
  source 1..80: mol_type = other DNA
gacttgcagcacttaatgcatttgtgtctcagactctaaccagacaagctgaggttagggctagtagacaacttgccaaa

SEQ ID NO: 16273 - DNA, 80 bp, synthetic construct
  misc_feature 1..80: note = Synthetic: >AlphaCoV1-cand-24660-24739
  source 1..80: mol_type = other DNA
gacaaggttaatgaatgtgttaggtctcagtctcagagatttggattctgtggtaatggtacacacttgttttcacttgc

SEQ ID NO: 16274 - DNA, 80 bp, synthetic construct
  misc_feature 1..80: note = Synthetic: >AlphaCoV1-cand-24740-24819
  source 1..80: mol_type = other DNA
aaatgcagcaccaaatggcatgattttctttcacacagtgttattaccaacagcatatgaaactgtgacggcatggtcag

SEQ ID NO: 16275 - DNA, 80 bp, synthetic construct
  misc_feature 1..80: note = Synthetic: >AlphaCoV1-cand-24820-24899
  source 1..80: mol_type = other DNA
gtatttgtgcttcagatggtgatcgcacttttggacttgtcgttaaagatgttcagttgactttgtttcgtaatctatga

SEQ ID NO: 16276 - DNA, 80 bp, synthetic construct
  misc_feature 1..80: note = Synthetic: >AlphaCoV1-cand-24900-24979
  source 1..80: mol_type = other DNA
tgacaagttttatttgactcctcgaactatgtatcagcctagagtagcaactagttctgattttgttcaaattgaagggt

SEQ ID NO: 16277 - DNA, 80 bp, synthetic construct
  misc_feature 1..80: note = Synthetic: >AlphaSp-cand-11400-11479
  source 1..80: mol_type = other DNA
acctcagttggtcaagcaactcagacatgctatgaatgtggcaaagagtgaatttgaccgtgaagcatccacacaacgaa

SEQ ID NO: 16278 - DNA, 80 bp, synthetic construct
  misc_feature 1..80: note = Synthetic: >AlphaSp-cand-11480-11559
  source 1..80: mol_type = other DNA
agttggatagaatggctgaacaagccgcttcacaaatgtataaggaggcacgtgctgtaaacagaaagtctaaagttgtt

SEQ ID NO: 16279 - DNA, 80 bp, synthetic construct
  misc_feature 1..80: note = Synthetic: >AlphaSp-cand-11560-11639
  source 1..80: mol_type = other DNA
agtgctatgcactctttgctctttggtatgttaaggcgattggatatgtcatctgttgacaccattcttagtttagctaa

SEQ ID NO: 16280 - DNA, 80 bp, synthetic construct
  misc_feature 1..80: note = Synthetic: >AlphaSp-cand-11720-11799
  source 1..80: mol_type = other DNA
attctaaaatacaacgtgatggttgcgtgcattatgctggtgttatctggtctgtcattgacattaaagataacgatggc

SEQ ID NO: 16281 - DNA, 80 bp, synthetic construct
  misc_feature 1..80: note = Synthetic: >AlphaSp-cand-12110-12189
  source 1..80: mol_type = other DNA
aagcacctagtggtcctgttgttaaatacttgtactttgtgcgcaaccttaataatttgcgcagaggtgcagtgctaggt

SEQ ID NO: 16282 - DNA, 80 bp, synthetic construct
  misc_feature 1..80: note = Synthetic: >AlphaSp-cand-12190-12269
  source 1..80: mol_type = other DNA
tttatcggagctacagttagactgcaagctggtaaacaaacagaacaggctactaattcttctttgttgactttatgtgc

SEQ ID NO: 16283 - DNA, 80 bp, synthetic construct
  misc_feature 1..80: note = Synthetic: >Anlong-cand-11150-11229
  source 1..80: mol_type = other DNA
ttgccaaagctgaatatgaccgagaagtttctgttcagaaaaaaattgagcgtatggctgagaatgcagcagcgcagatg

SEQ ID NO: 16284 - DNA, 80 bp, synthetic construct
  misc_feature 1..80: note = Synthetic: >Anlong-cand-11230-11309
  source 1..80: mol_type = other DNA
tacaaggaggcacgcgctgaaaatcgcaagtctaaaattattggctctatgcatgcattgctgtttggtatgttgcgaaa

SEQ ID NO: 16285 - DNA, 80 bp, synthetic construct
  misc_feature 1..80: note = Synthetic: >Anlong-cand-11310-11389
  source 1..80: mol_type = other DNA
actggacatgtctagtgttgacaacatactgagtttagctaagaatggtgttgtaccattgtctattatacctgctactt

SEQ ID NO: 16286 - DNA, 80 bp, synthetic construct
  misc_feature 1..80: note = Synthetic: >Anlong-cand-11390-11469
  source 1..80: mol_type = other DNA
ctgctactaagttgtgtattgtttgccccgatcatgaggcttacacaaagattatttatggtcaatgtgtgcattatgca

SEQ ID NO: 16287 - DNA, 80 bp, synthetic construct
  misc_feature 1..80: note = Synthetic: >Anlong-cand-11470-11549
  source 1..80: mol_type = other DNA
ggtgttgtgtggaatatagtagatgtcaaagacaatgatggtaaacccgttcatcaaaaagaaattgtcaaagctaatga

SEQ ID NO: 16288 - DNA, 80 bp, synthetic construct
  misc_feature 1..80: note = Synthetic: >Anlong-cand-11550-11629
  source 1..80: mol_type = other DNA
ggaaactcttagctggccattatccattaactgtgaacgtgttgttaagcttcagaacaatgaaatcattcctaacggta

SEQ ID NO: 16289 - DNA, 80 bp, synthetic construct
  misc_feature 1..80: note = Synthetic: >Anlong-cand-11630-11709
  source 1..80: mol_type = other DNA
aactcaagcagtgagccgttaaagctgaaggtgatggtttcagttgtgaaggtaaagcactttacaataatgaaggtggt

SEQ ID NO: 16290 - DNA, 80 bp, synthetic construct
  misc_feature 1..80: note = Synthetic: >Anlong-cand-11710-11789
  source 1..80: mol_type = other DNA
aagacatttatgtatgcatttttggccgacaaacctgatcttaaggtcgtaaagtgggagttcgatggtggctgtaatgt

SEQ ID NO: 16291 - DNA, 80 bp, synthetic construct
  misc_feature 1..80: note = Synthetic: >Anlong-cand-11790-11869
  source 1..80: mol_type = other DNA
catagagctagaagagcctcgtcggtttgccgttgaaactggtagtggtactcaaattaagtacttgtacttcgttaaaa

SEQ ID NO: 16292 - DNA, 80 bp, synthetic construct
  misc_feature 1..80: note = Synthetic: >Anlong-cand-11870-11949
  source 1..80: mol_type = other DNA
acctcaacacgttgaggagaggtgcagttcttggttttattggtgccactgttagagttcaagctggcaaacagactgaa

SEQ ID NO: 16293 - DNA, 80 bp, synthetic construct
  misc_feature 1..80: note = Synthetic: >Anlong-cand-11950-12029
  source 1..80: mol_type = other DNA
caggcttctaatagtcctctgttgacgatgtgtgctttcgctgtcgaccctgcaaaatgttatcttgatgcagtcaagag

SEQ ID NO: 16294 - DNA, 80 bp, synthetic construct
  misc_feature 1..80: note = Synthetic: >Anlong-cand-12030-12109
  source 1..80: mol_type = other DNA
tggtgtcaagccagtcggtaactgcataaaaatgttgtccaatggttctggtacaggccaagccataactaatggtgttg

SEQ ID NO: 16295 - DNA, 80 bp, synthetic construct
  misc_feature 1..80: note = Synthetic: >Anlong-cand-12110-12189
  source 1..80: mol_type = other DNA
agtctaatacaaatcaggacacctatggtggtgcttctgtttgtttgtattgtagagctcatgttgaacaccctagtatg

SEQ ID NO: 16296 - DNA, 80 bp, synthetic construct
  misc_feature 1..80: note = Synthetic: >Anlong-cand-12190-12269
  source 1..80: mol_type = other DNA
gatggattttgccgcctaaaaggtaagtatgtccaggtgcctattggaacattggatcctataaggtattgtctagaaaa

SEQ ID NO: 16297 - DNA, 80 bp, synthetic construct
  misc_feature 1..80: note = Synthetic: >Anlong-cand-12270-12349
  source 1..80: mol_type = other DNA
cactgtgtgtaaagtttgtgcctgctggttgaataatgggtgtcagtgtgaccgcactagtgtgcagagtcttgacaccg

SEQ ID NO: 16298 - DNA, 80 bp, synthetic construct
  misc_feature 1..80: note = Synthetic: >Anlong-cand-12350-12429
  source 1..80: mol_type = other DNA
gttatttaaacgagtgcggggctctagtgatgctcgactagagccccttaatggcactgacactgacaagtgtgttcgtg

SEQ ID NO: 16299 - DNA, 80 bp, synthetic construct
  misc_feature 1..80: note = Synthetic: >AvianCoV-cand-25330-25409
  source 1..80: mol_type = other DNA
caacaatgtaattttgctatagagagtgtgccaatggtgctttctcctattataaagaatggtgctctttattgtgaggg

SEQ ID NO: 16300 - DNA, 80 bp, synthetic construct
  misc_feature 1..80: note = Synthetic: >AvianCoV-cand-25410-25489
  source 1..80: mol_type = other DNA
tcagtggcttgctaaatgtgaaccagaccacttgcctaaagacatttttgtgtgtacaccagatagacgtaatatctatc

SEQ ID NO: 16301 - DNA, 80 bp, synthetic construct
  misc_feature 1..80: note = Synthetic: >AvianCoV-cand-25490-25569
  source 1..80: mol_type = other DNA
gtatggtgcagaaatacactggtgaccaaagcggaaataagaaaaggtttgctacatttgtctatgcaaagcagtcagta

SEQ ID NO: 16302 - DNA, 80 bp, synthetic construct
  misc_feature 1..80: note = Synthetic: >AvianCoV-cand-25570-25649
  source 1..80: mol_type = other DNA
gacactggcgagctagaaagtgtagcaacaggaggaagtagtctttacacataaatgtgtgtgtgtagagagtatttaaa

SEQ ID NO: 16303 - DNA, 80 bp, synthetic construct
  misc_feature 1..80: note = Synthetic: >AvianCoV-cand-25650-25729
  source 1..80: mol_type = other DNA
attattctttaatagtgcctctattttaagagcgcataagagtatttattttgaggattttaatataaatcctctttgtt

SEQ ID NO: 16304 - DNA, 80 bp, synthetic construct
  misc_feature 1..80: note = Synthetic: >AvianCoV-cand-25730-25809
  source 1..80: mol_type = other DNA
tcatactctcttttcaagagttattatttaaaaaacagtttttccactcttttgtgccaaaaactgttgttgttaatggt

SEQ ID NO: 16305 - DNA, 80 bp, synthetic construct
  misc_feature 1..80: note = Synthetic: >AvianCoV-cand-25810-25889
  source 1..80: mol_type = other DNA
gtagccttccaagtagataatggaaaagtctactacgaaggaaaacccatttttcaaaaaggttgttgtaggttgtggtc

SEQ ID NO: 16306 - DNA, 80 bp, synthetic construct
  misc_feature 1..80: note = Synthetic: >AvianCoV-cand-25890-25969
  source 1..80: mol_type = other DNA
ccattataagaaggattaaaataattaaaccaccaacaacacttacttgtattaaaggcgtttggacttacaagcgctta

SEQ ID NO: 16307 - DNA, 80 bp, synthetic construct
  misc_feature 1..80: note = Synthetic: >AvianCoV-cand-25970-26049
  source 1..80: mol_type = other DNA
aaagaaacaaatacggacgatgaaatggctgactagttttggaagagcattcatttcctgttataaagccctactattaa

SEQ ID NO: 16308 - DNA, 80 bp, synthetic construct
  misc_feature 1..80: note = Synthetic: >AvianCoV-cand-26050-26129
  source 1..80: mol_type = other DNA
ctcaattaagagttttagataggttaattttagatcacggaccaaagcgcgttttaacgtgtgctaggcgagtgctttta

SEQ ID NO: 16309 - DNA, 80 bp, synthetic construct
  misc_feature 1..80: note = Synthetic: >AvianCoV-cand-26130-26209
  source 1..80: mol_type = other DNA
tttcaattagatttagtttataggttggcatatacgcccacccaatcgctggtatgaataatagtaaagataatcctttt

SEQ ID NO: 16310 - DNA, 80 bp, synthetic construct
  misc_feature 1..80: note = Synthetic: >AvianCoV-cand-26210-26289
  source 1..80: mol_type = other DNA
cgcggagcaatagcaagaaaagcgcgaatttatctgagagaaggattagattgtgtttactttcttaacaaagcaggaca

SEQ ID NO: 16311 - DNA, 80 bp, synthetic construct
  misc_feature 1..80: note = Synthetic: >AvianCoV-cand-26290-26369
  source 1..80: mol_type = other DNA
agcagagccttgtcccgcgtgcacctcactagtattccaagggaaaacttgtgaggagcacatagataataataatcttt

SEQ ID NO: 16312 - DNA, 80 bp, synthetic construct
  misc_feature 1..80: note = Synthetic: >AvianCoV-cand-26360-26439
  source 1..80: mol_type = other DNA
aataatcttttatcatggcgagcggtaaggcaactggaaagacagacgccccagcgccagtcatcaaactaggaggacca

SEQ ID NO: 16313 - DNA, 80 bp, synthetic construct
  misc_feature 1..80: note = Synthetic: >AvianCoV-cand-26440-26519
  source 1..80: mol_type = other DNA
aaaccaccaaaagttggttcttctggaaatgcatcttggtttcaagcaataaaagccaagaagctaaattcacctccacc

SEQ ID NO: 16314 - DNA, 80 bp, synthetic construct
  misc_feature 1..80: note = Synthetic: >AvianCoV-cand-26520-26599
  source 1..80: mol_type = other DNA
taagtttgaaggtagtggtgttcctgataatgaaaatcttaaaacaagccagcagcatggatactggagacgccaagcca

SEQ ID NO: 16315 - DNA, 80 bp, synthetic construct
  misc_feature 1..80: note = Synthetic: >BtCoV_008_16-cand-6840-6919
  source 1..80: mol_type = other DNA
ttgtaagaagcataatttcttctgtgttgattgtgattcatatggacctgggtgtacttttatcaatgatgttattgctc

SEQ ID NO: 16316 - DNA, 80 bp, synthetic construct
  misc_feature 1..80: note = Synthetic: >BtCoV_008_16-cand-6920-6999
  source 1..80: mol_type = other DNA
cagaggttggtaacgttgtcaaacttaatgtcgtggctacaagtccagctactatagagatagataaagtagaattctct

SEQ ID NO: 16317 - DNA, 80 bp, synthetic construct
  misc_feature 1..80: note = Synthetic: >BtCoV_008_16-cand-7000-7079
  source 1..80: mol_type = other DNA
aacgggttctactatttgtatagtggtagtacattctggaagtataactttgatattactgaaggtaagtactcttgtaa

SEQ ID NO: 16318 - DNA, 80 bp, synthetic construct
  misc_feature 1..80: note = Synthetic: >BtCoV_008_16-cand-7080-7159
  source 1..80: mol_type = other DNA
ggaggcacttaagagctgtaatattactactgattttattgtttacaataataatgggtctaattttgcgcaggttaaga

SEQ ID NO: 16319 - DNA, 80 bp, synthetic construct
  misc_feature 1..80: note = Synthetic: >BtCoV_008_16-cand-7160-7239
  source 1..80: mol_type = other DNA
acgcctgtgtttatttttcccagttattgtgtaaacccattaaattagttgattcagcgttgcttgcgtcactaaatgtg

SEQ ID NO: 16320 - DNA, 80 bp, synthetic construct
  misc_feature 1..80: note = Synthetic: >BtCoV_008_16-cand-7240-7319
  source 1..80: mol_type = other DNA
gattttagtgctaatcttcatagtgcctttattggtgttcttaacaatagttttggtaaggatttgtctaattgtgccac

SEQ ID NO: 16321 - DNA, 80 bp, synthetic construct
  misc_feature 1..80: note = Synthetic: >BtCoV_008_16-cand-7320-7399
  source 1..80: mol_type = other DNA
tatgtctgactgtcgtaatgcccttggctttgacgaagtgtcagatgaggactttaatgcagctgtgtctgaagcacatc

SEQ ID NO: 16322 - DNA, 80 bp, synthetic construct
  misc_feature 1..80: note = Synthetic: >BtCoV_008_16-cand-7400-7479
  source 1..80: mol_type = other DNA
gctatgatgtcttgttaactgatatttcttttaacaacttctttacctcgtatgccaaaccggaggaaaagttgccagtt

SEQ ID NO: 16323 - DNA, 80 bp, synthetic construct
  misc_feature 1..80: note = Synthetic: >BtCoV_008_16-cand-7480-7559
  source 1..80: mol_type = other DNA
catgacatagccacatgtatgcgtgtgggtgctaaggttgctaatcataatgtcctaacaaaggataacttatccgttgt

SEQ ID NO: 16324 - DNA, 80 bp, synthetic construct
  misc_feature 1..80: note = Synthetic: >BtCoV_008_16-cand-7560-7639
  source 1..80: mol_type = other DNA
ttggcttgtgagagactttatggccctatctgatgagaccagaaaataccttgtgcgtactactaaggttaaagggatta

SEQ ID NO: 16325 - DNA, 80 bp, synthetic construct
  misc_feature 1..80: note = Synthetic: >BtCoV_008_16-cand-7640-7719
  source 1..80: mol_type = other DNA
acttcatgttaacctttaatgataggcgtatgcacacttctatacctgtagttaatattgctaataagaagggtgctggt

SEQ ID NO: 16326 - DNA, 80 bp, synthetic construct
  misc_feature 1..80: note = Synthetic: >BtCoV_008_16-cand-7720-7799
  source 1..80: mol_type = other DNA
tttccaacactgtttagcaagtgttacaagtttttctggtatttctgtgtcttagttgtgttgctgttcttttcacttag

SEQ ID NO: 16327 - DNA, 80 bp, synthetic construct
  misc_feature 1..80: note = Synthetic: >BtCoV_008_16-cand-7800-7879
  source 1..80: mol_type = other DNA
tttctatgatttttcaattcaggtcactagtattagtgattatgatttcaaatatatagaacgtggagttttaaaagatt

SEQ ID NO: 16328 - DNA, 80 bp, synthetic construct
  misc_feature 1..80: note = Synthetic: >BtCoV_008_16-cand-7880-7959
  source 1..80: mol_type = other DNA
ttcataaaccactatcatgtgtgcataatgtttttgacaattttgatagttggcatcatgctaagttcgggtcaacacct

SEQ ID NO: 16329 - DNA, 80 bp, synthetic construct
  misc_feature 1..80: note = Synthetic: >BtCoV_008_16-cand-7960-8039
  source 1..80: mol_type = other DNA
acacatggtagaagttgtcctatagttgtaggcacttctgatgaggcccgtactgtaccaggtgttccttctggcgtcta

SEQ ID NO: 16330 - DNA, 80 bp, synthetic construct
  misc_feature 1..80: note = Synthetic: >BtCoV_008_16-cand-8040-8119
  source 1..80: mol_type = other DNA
tttggtaggtaaaaccatagtctttgccatgaacaccatttttggttcatccggtttgtgttttgatgagcgtggcgttg

SEQ ID NO: 16331 - DNA, 80 bp, synthetic construct
  misc_feature 1..80: note = Synthetic: >BtCoV_008_16-cand-10670-10749
  source 1..80: mol_type = other DNA
tggctcttggctatttgttctgcatgttctatggtgtactctattgggttaatagattttttaagttgcgcctaggagtg

SEQ ID NO: 16332 - DNA, 80 bp, synthetic construct
  misc_feature 1..80: note = Synthetic: >BtCoV_008_16-cand-10750-10829
  source 1..80: mol_type = other DNA
tatgattttatggtcagtcctgttgagtttaagtatatggttgctaatggtcttaaggctccacgaggtgtctttgattc

SEQ ID NO: 16333 - DNA, 80 bp, synthetic construct
  misc_feature 1..80: note = Synthetic: >BtCoV_008_16-cand-10830-10909
  source 1..80: mol_type = other DNA
tatgatcttgtctctcaaacttattggtgttggtggtgataagtgcatcaaggtgtcatctgtgcagtccaaactgacag

SEQ ID NO: 16334 - DNA, 80 bp, synthetic construct
  misc_feature 1..80: note = Synthetic: >BtCoV_008_16-cand-10910-10989
  source 1..80: mol_type = other DNA
acattaagtgtactaatgtcgtcttgttgggttgtcttactagtatgaacgttaactctaactctgcggagtgggcttat

SEQ ID NO: 16335 - DNA, 80 bp, synthetic construct
  misc_feature 1..80: note = Synthetic: >BtCoV_008_16-cand-10990-11069
  source 1..80: mol_type = other DNA
tgtgttgatttgcataataagataaatctctgcaatgatgctgttgaggctcaagaaatgcttttagctctcttggcctt

SEQ ID NO: 16336 - DNA, 80 bp, synthetic construct
  misc_feature 1..80: note = Synthetic: >BtCoV_008_16-cand-11070-11149
  source 1..80: mol_type = other DNA
cttccttagtaagaacagcgctttcggtattgatgacctggttgattcttactttaatgataatgctatgttgcagagtg

SEQ ID NO: 16337 - DNA, 80 bp, synthetic construct
  misc_feature 1..80: note = Synthetic: >BtCoV_008_16-cand-11150-11229
  source 1..80: mol_type = other DNA
ttgcgtctacatatgttaatatgccttcatatatagcatatgaaagtgcacgtcagagttatgaagatgctgttgctaat

SEQ ID NO: 16338 - DNA, 80 bp, synthetic construct
  misc_feature 1..80: note = Synthetic: >BtCoV_008_16-cand-11230-11309
  source 1..80: mol_type = other DNA
caatcaccaccacaacttgttaagcaacttcgtcatgcgatgaatgttgcaaaggatgagtttaaccgtgaagcctctac

SEQ ID NO: 16339 - DNA, 80 bp, synthetic construct
  misc_feature 1..80: note = Synthetic: >BtCoV_008_16-cand-11310-11389
  source 1..80: mol_type = other DNA
acaacgtaagcttgatcgtatggccgaacaggctgcagctcaaatgtacaaggaagcgcgcgctgttaaccgtaaatcta

SEQ ID NO: 16340 - DNA, 80 bp, synthetic construct
  misc_feature 1..80: note = Synthetic: >BtCoV_008_16-cand-11390-11469
  source 1..80: mol_type = other DNA
aggttactagtgctatgcattccttgttgtttgctatgcttagacgacttgatatgtcatctattgatgtcattctccaa

SEQ ID NO: 16341 - DNA, 80 bp, synthetic construct
  misc_feature 1..80: note = Synthetic: >BtCoV_008_16-cand-11470-11549
  source 1..80: mol_type = other DNA
ttggctaaggatggtactgtgcctctttctgtcataccagcacttagtgcaactaagcttacaataattgtgtctgatat

SEQ ID NO: 16342 - DNA, 80 bp, synthetic construct
  misc_feature 1..80: note = Synthetic: >BtCoV_008_16-cand-11550-11629
  source 1..80: mol_type = other DNA
agagtcttataacaggctacagcgtgagggctgtgttcattatgctggtgtcatctggtcggtgctagatgttaaagata

SEQ ID NO: 16343 - DNA, 80 bp, synthetic construct
  misc_feature 1..80: note = Synthetic: >BtCoV_008_16-cand-11630-11709
  source 1..80: mol_type = other DNA
atgatggcaaggccgttcatgttaaggaaatcacaacacaaaactctgattctcttgcatggcctctctttcttaattgc

SEQ ID NO: 16344 - DNA, 80 bp, synthetic construct
  misc_feature 1..80: note = Synthetic: >BtCoV_008_16-cand-11710-11789
  source 1..80: mol_type = other DNA
gaacgtattgttaagttgcagaataatgagattattcctggtaagcttaaacagcgggctatgaaagctgaaggtgatgg

SEQ ID NO: 16345 - DNA, 80 bp, synthetic construct
  misc_feature 1..80: note = Synthetic: >BtCoV_008_16-cand-11790-11869
  source 1..80: mol_type = other DNA
ttttgttgctgatggtaaggctctttataatactgaaggtggtcgtacatttatgtacgcattcatctctgataaggccg

SEQ ID NO: 16346 - DNA, 80 bp, synthetic construct
  misc_feature 1..80: note = Synthetic: >BtCoV_008_16-cand-11870-11949
  source 1..80: mol_type = other DNA
accttaaagttgttaagtgggagtatgaaggcggttgtaacaccattgagttggagccacctcgtaaattccttgtagag

SEQ ID NO: 16347 - DNA, 80 bp, synthetic construct
  misc_feature 1..80: note = Synthetic: >BtCoV_008_16-cand-14500-14579
  source 1..80: mol_type = other DNA
ctactactgcttatgccaattctgtttttaacatttaccaggctgtgagtgctaatgttaatagattgcttggtgttgat

SEQ ID NO: 16348 - DNA, 80 bp, synthetic construct
  misc_feature 1..80: note = Synthetic: >BtCoV_008_16-cand-14580-14659
  source 1..80: mol_type = other DNA
agtaacacttgtaacaatcttgaagttaagcagctgcaacgtaagctttatgattgctgttataggtcatctaatgtaga

SEQ ID NO: 16349 - DNA, 80 bp, synthetic construct
  misc_feature 1..80: note = Synthetic: >BtCoV_008_16-cand-14660-14739
  source 1..80: mol_type = other DNA
tgctagttttgtggatgaatattttggttatctacgtaagcatttctctatgatgattttgtcggatgacggcgttgttt

SEQ ID NO: 16350 - DNA, 80 bp, synthetic construct
  misc_feature 1..80: note = Synthetic: >BtCoV_008_16-cand-14740-14819
  source 1..80: mol_type = other DNA
gctacaatagcgaatacgcggcaatgggctatgttgcagatcttagcgcttttaaagctgtgttgtattatcagaataac

SEQ ID NO: 16351 - DNA, 80 bp, synthetic construct
  misc_feature 1..80: note = Synthetic: >BtCoV_008_16-cand-14820-14899
  source 1..80: mol_type = other DNA
gttttcatgagtgcttcaaagtgttggattgaacccgacattaataagggcccgcatgaattctgttctcaacatacaat

SEQ ID NO: 16352 - DNA, 80 bp, synthetic construct
  misc_feature 1..80: note = Synthetic: >BtCoV_008_16-cand-14900-14979
  source 1..80: mol_type = other DNA
gcagattgttgacaaggatggcacttattttctgcctttccccgatccatcacgcatattgtctgcgggggtttttgttg

SEQ ID NO: 16353 - DNA, 80 bp, synthetic construct
  misc_feature 1..80: note = Synthetic: >BtCoV_008_16-cand-14980-15059
  source 1..80: mol_type = other DNA
atgacatagttaagactgaccctgttatacttttagaacgttatgtgtcacttgctattgatgcttacccgttatctaag

SEQ ID NO: 16354 - DNA, 80 bp, synthetic construct
  misc_feature 1..80: note = Synthetic: >BtCoV_008_16-cand-15060-15139
  source 1..80: mol_type = other DNA
catgagaatcctgaatatagaaaagttttctcagtgcttttggattgggtcaagcatttatataagacacttaatcaggg

SEQ ID NO: 16355 - DNA, 80 bp, synthetic construct
  misc_feature 1..80: note = Synthetic: >BtCoV_008_16-cand-15140-15219
  source 1..80: mol_type = other DNA
tgtgctggagtcattctctgtcacattactagaggatgcaactgctaagttttgggatgagagcttttatgctaatatgt

SEQ ID NO: 16356 - DNA, 80 bp, synthetic construct
  misc_feature 1..80: note = Synthetic: >BtCoV_008_16-cand-15220-15299
  source 1..80: mol_type = other DNA
atgaacggtctgctgttttacagtctgcgggcctttgtgttgtctgttcatcacaaactgtcctgaggtgtggtgattgt

SEQ ID NO: 16357 - DNA, 80 bp, synthetic construct
  misc_feature 1..80: note = Synthetic: >BtCoV_008_16-cand-15300-15379
  source 1..80: mol_type = other DNA
ttgcggcgtcccatgctgtgtactaagtgtgcttatgaccatgttattggaactagccataagtttatcttagcaatcac

SEQ ID NO: 16358 - DNA, 80 bp, synthetic construct
  misc_feature 1..80: note = Synthetic: >BtCoV_008_16-cand-15380-15459
  source 1..80: mol_type = other DNA
accctatgtttgctgcgcctctggttgtggtgtttctgatgttactaagttgtatcttggtggtttaagttattggtgcg

SEQ ID NO: 16359 - DNA, 80 bp, synthetic construct
  misc_feature 1..80: note = Synthetic: >BtCoV_008_16-cand-15460-15539
  source 1..80: mol_type = other DNA
ttgaccacaaacctcgtcttgcttttcctttgtgttcagctggcaatgtttttggactttacaaaaactctgccactggt

SEQ ID NO: 16360 - DNA, 80 bp, synthetic construct
  misc_feature 1..80: note = Synthetic: >BtCoV_008_16-cand-15540-15619
  source 1..80: mol_type = other DNA
tctccagatgtagaagactttaatgttcttgcaacttctgaatggacggatgtccgagattataagttggctaatgacgt

SEQ ID NO: 16361 - DNA, 80 bp, synthetic construct
  misc_feature 1..80: note = Synthetic: >BtCoV_008_16-cand-15620-15699
  source 1..80: mol_type = other DNA
taaggactctctacggctctttgcagcagaaactattaaagctaaggaagagagtgttaagtcatcttatgcttgtgcca

SEQ ID NO: 16362 - DNA, 80 bp, synthetic construct
  misc_feature 1..80: note = Synthetic: >BtCoV_008_16-cand-15700-15779
  source 1..80: mol_type = other DNA
ctatccatgaggtcattggtccaaaggagcttgttcttaagtgggaggctggtaaacctaagccacctcttaataggaat

SEQ ID NO: 16363 - DNA, 80 bp, synthetic construct
  misc_feature 1..80: note = Synthetic: >BtCoV_008_16-cand-17060-17139
  source 1..80: mol_type = other DNA
ggactgctataagggtgatgacttgttacctccttctcatgctaatacttttatggcactctctgataactttaaaactg

SEQ ID NO: 16364 - DNA, 80 bp, synthetic construct
  misc_feature 1..80: note = Synthetic: >BtCoV_008_16-cand-17140-17219
  source 1..80: mol_type = other DNA
acaaagaattggcagttcaaataggtgtcagtggacaagttaagtatgaacatgtggtttcttttatgggttttaggttt

SEQ ID NO: 16365 - DNA, 80 bp, synthetic construct
  misc_feature 1..80: note = Synthetic: >BtCoV_008_16-cand-17220-17299
  source 1..80: mol_type = other DNA
gacatcagtgttcccaactaccatactctgttttgcactcgtgattttgcgatgaggcatgttagaggttggttgggatt

SEQ ID NO: 16366 - DNA, 80 bp, synthetic construct
  misc_feature 1..80: note = Synthetic: >BtCoV_008_16-cand-17300-17379
  source 1..80: mol_type = other DNA
cgatgtcgaaggcgcccatgtgactggtagcaatgttggcactaatgttccattacagttaggcttctctaatggggtgg

SEQ ID NO: 16367 - DNA, 80 bp, synthetic construct
  misc_feature 1..80: note = Synthetic: >BtCoV_008_16-cand-17380-17459
  source 1..80: mol_type = other DNA
attttgtcgtcagaccagagggttgtgtttctactgaaacaggcgattttatcaaacccgttagagcacgagctcctcca

SEQ ID NO: 16368 - DNA, 80 bp, synthetic construct
  misc_feature 1..80: note = Synthetic: >BtCoV_008_16-cand-17460-17539
  source 1..80: mol_type = other DNA
ggtgagcaatttacacatttagttccacttatacgcaagggtcagccttgggatgttgtacgtaagcgtatagtccagat

SEQ ID NO: 16369 - DNA, 80 bp, synthetic construct
  misc_feature 1..80: note = Synthetic: >BtCoV_008_16-cand-17540-17619
  source 1..80: mol_type = other DNA
gtgtagtgattacctagctaatcaatctgacatactcgtttttgttttatgggcaggtggattggagctcaccactatgc

SEQ ID NO: 16370 - DNA, 80 bp, synthetic construct
  misc_feature 1..80: note = Synthetic: >BtCoV_008_16-cand-17620-17699
  source 1..80: mol_type = other DNA
gttattttctcaagataggactagtcaaacattgtgactgtggtaagatagctacctgttacaatagtagctcgcatagc

SEQ ID NO: 16371 - DNA, 80 bp, synthetic construct
  misc_feature 1..80: note = Synthetic: >BtCoV_008_16-cand-17700-17779
  source 1..80: mol_type = other DNA
ttctgttgtttcaggcatgcccttgggtgtgattatctgtataatgcctattgtattgatatacagcaatggggttacac

SEQ ID NO: 16372 - DNA, 80 bp, synthetic construct
  misc_feature 1..80: note = Synthetic: >BtCoV_008_16-cand-17780-17859
  source 1..80: mol_type = other DNA
aggctctcttagtctcaatcaccatgaacactgcaatattcatcgtaatgaacatgtggcttcaggtgatgcaactatga

SEQ ID NO: 16373 - DNA, 80 bp, synthetic construct
  misc_feature 1..80: note = Synthetic: >BtCoV_008_16-cand-17860-17939
  source 1..80: mol_type = other DNA
cacgctgtttggctattcataattgttttgtcaagaatgtagactggtctatcacctatccttttattgccaatgaacaa

SEQ ID NO: 16374 - DNA, 80 bp, synthetic construct
  misc_feature 1..80: note = Synthetic: >BtCoV_008_16-cand-17940-18019
  source 1..80: mol_type = other DNA
gctattaataagagtggacgcataattcaatctcatgttatgcgcgctgctattaagctgtataatcctaaagcaatcca

SEQ ID NO: 16375 - DNA, 80 bp, synthetic construct
  misc_feature 1..80: note = Synthetic: >BtCoV_008_16-cand-18020-18099
  source 1..80: mol_type = other DNA
cgacattggtaatcctaagggcacacgttgtgttgctactgatattagttggtactgttatgataaaaaccctaccaaaa

SEQ ID NO: 16376 - DNA, 80 bp, synthetic construct
  misc_feature 1..80: note = Synthetic: >BtCoV_008_16-cand-18100-18179
  source 1..80: mol_type = other DNA
ccaatgttaaggtattagaatacgattatataactcatggtcaattagaaggattgtgcctattctggaactgtaatgtg

SEQ ID NO: 16377 - DNA, 80 bp, synthetic construct
  misc_feature 1..80: note = Synthetic: >BtCoV_008_16-cand-18180-18259
  source 1..80: mol_type = other DNA
gatatgtacccagaactttctgtggtatgcagatttgacactaggtgtagatccaaccttaacctagagggttgtaatgg

SEQ ID NO: 16378 - DNA, 80 bp, synthetic construct
  misc_feature 1..80: note = Synthetic: >BtCoV_008_16-cand-18260-18339
  source 1..80: mol_type = other DNA
tggatctctctacgtcaataatcatgctttccacacaccggcatttgataaacgtgcttttgctaagttgaaggcaatgc

SEQ ID NO: 16379 - DNA, 80 bp, synthetic construct
  misc_feature 1..80: note = Synthetic: >BtCoV_008_16-cand-19620-19699
  source 1..80: mol_type = other DNA
tgtggttatagtatgccatctatttataaaatccaacgtatgtgtctagagccatgtaatttgtacaattatggcactgg

SEQ ID NO: 16380 - DNA, 80 bp, synthetic construct
  misc_feature 1..80: note = Synthetic: >BtCoV_008_16-cand-19700-19779
  source 1..80: mol_type = other DNA
tattaagttaccagatggcataatgttcaatgtggttaagtacacgcaactatgtcaataccttaatagcaccacaatgt

SEQ ID NO: 16381 - DNA, 80 bp, synthetic construct
  misc_feature 1..80: note = Synthetic: >BtCoV_008_16-cand-19780-19859
  source 1..80: mol_type = other DNA
gtataccacaccatatgcgcgtgttgcatcttggtgcaggctctgataagggtgttgcaccaggtacagctgtgctgcgg

SEQ ID NO: 16382 - DNA, 80 bp, synthetic construct
  misc_feature 1..80: note = Synthetic: >BtCoV_008_16-cand-19860-19939
  source 1..80: mol_type = other DNA
cgttggttacctatggatgctgttattgttgataatgacatggtagattatgttagcgatgcagatttcagttacacagg

SEQ ID NO: 16383 - DNA, 80 bp, synthetic construct
  misc_feature 1..80: note = Synthetic: >BtCoV_008_16-cand-19940-20019
  source 1..80: mol_type = other DNA
tgattgctcgtcattatatcttattgacaagtttgatcttgttatttctgatatgtatgatggaaaaattaagtcctgtg

SEQ ID NO: 16384 - DNA, 80 bp, synthetic construct
  misc_feature 1..80: note = Synthetic: >BtCoV_008_16-cand-20020-20099
  source 1..80: mol_type = other DNA
acggtgagaatgtgtcaaaagaaggtttctttccctatattaatggtattattaatgagaagttggctcttggagggaca

SEQ ID NO: 16385 - DNA, 80 bp, synthetic construct
  misc_feature 1..80: note = Synthetic: >BtCoV_008_16-cand-20100-20179
  source 1..80: mol_type = other DNA
gttgctattaaagttactgagttcagttggaataagaagctttatgagctaatacagaggtttgaatactggacaatgtt

SEQ ID NO: 16386 - DNA, 80 bp, synthetic construct
  misc_feature 1..80: note = Synthetic: >BtCoV_008_16-cand-20180-20259
  source 1..80: mol_type = other DNA
ttgtaccagtgttaatacttcgtcatctgaagcattcttaataggtgtccattatttgggtgattttgcctcgaatgcaa

SEQ ID NO: 16387 - DNA, 80 bp, synthetic construct
  misc_feature 1..80: note = Synthetic: >BtCoV_008_16-cand-20260-20339
  source 1..80: mol_type = other DNA
ttgttgatggtaacaccatgcatgccaattatatattctggaggaattcaacaatgatggctatgtcttattatagtgtt

SEQ ID NO: 16388 - DNA, 80 bp, synthetic construct
  misc_feature 1..80: note = Synthetic: >BtCoV_008_16-cand-20340-20419
  source 1..80: mol_type = other DNA
cttgacttgagcaagtttaattgcaaacataaggccactgttgttttgaaccttaaggaatcatcaatttctgatgttgt

SEQ ID NO: 16389 - DNA, 80 bp, synthetic construct
  misc_feature 1..80: note = Synthetic: >BtCoV_008_16-cand-20420-20499
  source 1..80: mol_type = other DNA
tattggtttgttaaggaatggtaagttgttaattaggaataatggcgctgtgtgtgatctttctaatcatctggtcaaca

SEQ ID NO: 16390 - DNA, 80 bp, synthetic construct
  misc_feature 1..80: note = Synthetic: >BtCoV_008_16-cand-20500-20579
  source 1..80: mol_type = other DNA
caacgaaatgagaatacatctcttccttctaacaatagttgctattgcatttggacaaaataattataattgtaatggac

SEQ ID NO: 16391 - DNA, 80 bp, synthetic construct
  misc_feature 1..80: note = Synthetic: >BtCoV_008_16-cand-20580-20659
  source 1..80: mol_type = other DNA
ctagttcctttaatagattcttttctaagtttgacataccaccctcttctactgttgtagttggtggataccttcccaac

SEQ ID NO: 16392 - DNA, 80 bp, synthetic construct
  misc_feature 1..80: note = Synthetic: >BtCoV_008_16-cand-20660-20739
  source 1..80: mol_type = other DNA
ataactggtggctggtactgtaaaactgatgttaatgacgtcactaatgttcatggtgtgtttctgcggtttattaatgg

SEQ ID NO: 16393 - DNA, 80 bp, synthetic construct
  misc_feature 1..80: note = Synthetic: >BtCoV_008_16-cand-20740-20819
  source 1..80: mol_type = other DNA
tggtgaaggctttactataggcgtttcacaagacacctttaatcctgataaacaccaattttatttacataaaccgcgtg

SEQ ID NO: 16394 - DNA, 80 bp, synthetic construct
  misc_feature 1..80: note = Synthetic: >BtCoV_008_16-cand-20820-20899
  source 1..80: mol_type = other DNA
atggtaatcctggggccactggctatttgcgtatttgcaagtgggctagtgcagccactagttttggtgattacaatgtt

SEQ ID NO: 16395 - DNA, 80 bp, synthetic construct
  misc_feature 1..80: note = Synthetic: >BtCoV_008_16-cand-22190-22269
  source 1..80: mol_type = other DNA
tgtccgtttaatcctcatagtgttaacaattacttgtcttttggcaagttttgcctttccaattacactttagctgagtc

SEQ ID NO: 16396 - DNA, 80 bp, synthetic construct
  misc_feature 1..80: note = Synthetic: >BtCoV_008_16-cand-22270-22349
  source 1..80: mol_type = other DNA
atgccaggttgaggtgtatgtaaagcgtagttcaactacccattacatcaccactctgtattttcaaacatcacttggcg

SEQ ID NO: 16397 - DNA, 80 bp, synthetic construct
  misc_feature 1..80: note = Synthetic: >BtCoV_008_16-cand-22350-22429
  source 1..80: mol_type = other DNA
atgttgttacaggtgtacctaatgctcttggtggtgtgacagatgtctcattctaccaggagggcgtgtgttctcagtat

SEQ ID NO: 16398 - DNA, 80 bp, synthetic construct
  misc_feature 1..80: note = Synthetic: >BtCoV_008_16-cand-22430-22509
  source 1..80: mol_type = other DNA
accatctacggacacaaaggtgagggtataatctctaagtccaatcttgcttatctctcaggcttatattatacatcacc

SEQ ID NO: 16399 - DNA, 80 bp, synthetic construct
  misc_feature 1..80: note = Synthetic: >BtCoV_008_16-cand-22510-22589
  source 1..80: mol_type = other DNA
atctggacaaatcttagcttttaaaaatattacaacaggtgacatctactcagttctaccatgttcatactcacaacagg

SEQ ID NO: 16400 - DNA, 80 bp, synthetic construct
  misc_feature 1..80: note = Synthetic: >BtCoV_008_16-cand-22590-22669
  source 1..80: mol_type = other DNA
ctgtctttataggcggtgttattgttggtgtaatgaatggctttaataacactttgccttatagtttcactcgtgagctg

SEQ ID NO: 16401 - DNA, 80 bp, synthetic construct
  misc_feature 1..80: note = Synthetic: >BtCoV_008_16-cand-22670-22749
  source 1..80: mol_type = other DNA
ccgggtttcttttatcattctaatgatagttctaattgcactgaaccggcactcgtttactccaatatcggtgtttgtaa

SEQ ID NO: 16402 - DNA, 80 bp, synthetic construct
  misc_feature 1..80: note = Synthetic: >BtCoV_008_16-cand-22750-22829
  source 1..80: mol_type = other DNA
gagtggctctctaggtgtggttggtgttaggaacacacagcccaagattcaacctatgtcggaaggtgttattagtgtgc

SEQ ID NO: 16403 - DNA, 80 bp, synthetic construct
  misc_feature 1..80: note = Synthetic: >BtCoV_008_16-cand-22830-22909
  source 1..80: mol_type = other DNA
ccactaacctcactatgcaaatcagaactgagtatatacaattgtttaatagacctgttagtatagattgtgcaatgtat

SEQ ID NO: 16404 - DNA, 80 bp, synthetic construct
  misc_feature 1..80: note = Synthetic: >BtCoV_008_16-cand-22910-22989
  source 1..80: mol_type = other DNA
gtttgtaatggcaaccctcgctgtaatgctctattaagtcaatatgcctctgcatgtcagactatagaatcatcactgca

SEQ ID NO: 16405 - DNA, 80 bp, synthetic construct
  misc_feature 1..80: note = Synthetic: >BtCoV_008_16-cand-22990-23069
  source 1..80: mol_type = other DNA
gctgggtgctcgtttagaatctatcgaggttaatgatatgcttactgtgtctgatgaagctctcagacttagcaccattg

SEQ ID NO: 16406 - DNA, 80 bp, synthetic construct
  misc_feature 1..80: note = Synthetic: >BtCoV_008_16-cand-23070-23149
  source 1..80: mol_type = other DNA
acacctttggaggtggcaattataattttagtaatgtgctcggtgcatctcctggtcagcgcagctttattgaagatatt

SEQ ID NO: 16407 - DNA, 80 bp, synthetic construct
  misc_feature 1..80: note = Synthetic: >BtCoV_008_16-cand-23150-23229
  source 1..80: mol_type = other DNA
ctttttgataaggtcgtcaccaatggtcttggtactgtggatgaggactacaagaagtgtactaatggtctttctattgc

SEQ ID NO: 16408 - DNA, 80 bp, synthetic construct
  misc_feature 1..80: note = Synthetic: >BtCoV_008_16-cand-23230-23309
  source 1..80: mol_type = other DNA
agaccttgcgtgtgcacagtattatagtggtgtcatggttcttccgggcgtcgctgacgctgagaaggttcacatgtaca

SEQ ID NO: 16409 - DNA, 80 bp, synthetic construct
  misc_feature 1..80: note = Synthetic: >BtCoV_008_16-cand-23310-23389
  source 1..80: mol_type = other DNA
gcgcatctttaatgggaggtatggcattaggtggtgttacttccgttgcagccttgccatttagttacgctgtacaggcc

SEQ ID NO: 16410 - DNA, 80 bp, synthetic construct
  misc_feature 1..80: note = Synthetic: >BtCoV_008_16-cand-23390-23469
  source 1..80: mol_type = other DNA
aggcttaattatgttgccttgcagacagatgttttacagagaaatcaacagttgttggctcagtcctttaataatgctat

SEQ ID NO: 16411 - DNA, 80 bp, synthetic construct
  misc_feature 1..80: note = Synthetic: >Delta-cand-24430-24509
  source 1..80: mol_type = other DNA
gacggttggctgcacttaatgcatatgttactcagttactcaatcagatgtctcagattagacaatctcgattgttagct

SEQ ID NO: 16412 - DNA, 80 bp, synthetic construct
  misc_feature 1..80: note = Synthetic: >Delta-cand-24510-24589
  source 1..80: mol_type = other DNA
cagcaaaagattaatgagtgtgtcaaatcacagtcgtccagatacggtttctgtggaaatggcacacacatcttctcact

SEQ ID NO: 16413 - DNA, 80 bp, synthetic construct
  misc_feature 1..80: note = Synthetic: >Delta-cand-24590-24669
  source 1..80: mol_type = other DNA
tacacagactgcaccaaatggcatatttttcatgcatgcagtgctagtacccaacaaattcacacgtgtcaacgcttctg

SEQ ID NO: 16414 - DNA, 80 bp, synthetic construct
  misc_feature 1..80: note = Synthetic: >Delta-cand-24670-24749
  source 1..80: mol_type = other DNA
ccggcatttgtgtggataatacgagaggctactcattgcgtagctctaacatggaaggccaagcctacatagctagagat

SEQ ID NO: 16415 - DNA, 80 bp, synthetic construct
  misc_feature 1..80: note = Synthetic: >Delta-cand-24750-24829
  source 1..80: mol_type = other DNA
gagcctcaacttatactctaccagtttaataactcctggagagttacacctagaaatatgtatgaacccagactgccccg

SEQ ID NO: 16416 - DNA, 80 bp, synthetic construct
  misc_feature 1..80: note = Synthetic: >Delta-cand-24830-24909
  source 1..80: mol_type = other DNA
gcaggctgatttcatacaattaactgattgcagcgttactttttacaacaccaccgctgctaatcttcccaatattatcc

SEQ ID NO: 16417 - DNA, 80 bp, synthetic construct
  misc_feature 1..80: note = Synthetic: >Delta-cand-24910-24989
  source 1..80: mol_type = other DNA
ctgacattatagatgtcaatcaaacagtcagtgatattattgacaatttacctacagcaacacctcctcagtgggatgtt

SEQ ID NO: 16418 - DNA, 80 bp, synthetic construct
  misc_feature 1..80: note = Synthetic: >Delta-cand-24990-25069
  source 1..80: mol_type = other DNA
ggtatctataacaacactattctcaacctcaccgttgagattaatgatctacaagagcggtctaaaaacctctcacagat

SEQ ID NO: 16419 - DNA, 80 bp, synthetic construct
  misc_feature 1..80: note = Synthetic: >Delta-cand-25070-25149
  source 1..80: mol_type = other DNA
tgcagatcgtttacaaaattatattgacaatcttaacaatactctagttgaccttgaatggctcaacagagtggaaactt

SEQ ID NO: 16420 - DNA, 80 bp, synthetic construct
  misc_feature 1..80: note = Synthetic: >Delta-cand-25150-25229
  source 1..80: mol_type = other DNA
accttaaatggccgtggtatatatggcttgccattgccctggctcttattgcatttgtgacaatcctcataacaatcttt

SEQ ID NO: 16421 - DNA, 80 bp, synthetic construct
  misc_feature 1..80: note = Synthetic: >Delta-cand-25230-25309
  source 1..80: mol_type = other DNA
ctttgtactggttgttgtggtggttgctttggttgttgtggcggttgttttggccttttctctaagaagaaaaggtctat

SEQ ID NO: 16422 - DNA, 80 bp, synthetic construct
  misc_feature 1..80: note = Synthetic: >Delta-cand-25310-25389
  source 1..80: mol_type = other DNA
gaggcagcacacgaaccggtacaagacaccaacctctaataccgacgatacaaaccaaccaacaccgtcctttaagttta

SEQ ID NO: 16423 - DNA, 80 bp, synthetic construct
  misc_feature 1..80: note = Synthetic: >Delta-cand-25390-25469
  source 1..80: mol_type = other DNA
aggaatggtagtcgacgactgggccgttaccatccctggacaatatattattgctatactagttgtcatctgcattggtg

SEQ ID NO: 16424 - DNA, 80 bp, synthetic construct
  misc_feature 1..80: note = Synthetic: >Delta-cand-25470-25549
  source 1..80: mol_type = other DNA
tggcactactttttattaacacttgcttagcttgtgttaaattattttacaagtgctacctaggggcagcatatcttgtt

SEQ ID NO: 16425 - DNA, 80 bp, synthetic construct
  misc_feature 1..80: note = Synthetic: >Delta-cand-25550-25629
  source 1..80: mol_type = other DNA
aggcctattatagtgtactactccaagccgaaccccgtaccgagatttacgcctccttataatgaggatgagtttgtaaa

SEQ ID NO: 16426 - DNA, 80 bp, synthetic construct
  misc_feature 1..80: note = Synthetic: >Delta-cand-25630-25709
  source 1..80: mol_type = other DNA
agtacaccaatttcctagaaacacttggcactatgtctgaatagcacaactgctacacctactactgccaaaatcagtat

SEQ ID NO: 16427 - DNA, 80 bp, synthetic construct
  misc_feature 1..80: note = Synthetic: >HKU1-cand-19910-19989
  source 1..80: mol_type = other DNA
cagagtttagaaaacgtaatatataacttggttaatgttggtcattatgatggacgtacaggtgaattaccttgtgctat

SEQ ID NO: 16428 - DNA, 80 bp, synthetic construct
  misc_feature 1..80: note = Synthetic: >HKU1-cand-19990-20069
  source 1..80: mol_type = other DNA
tatgaatgacaaagttgttgttaagattaataatgtagatactgttatttttaaaaataatacatcatttcctactaata

SEQ ID NO: 16429 - DNA, 80 bp, synthetic construct
  misc_feature 1..80: note = Synthetic: >HKU1-cand-20070-20149
  source 1..80: mol_type = other DNA
tagctgttgaattgtttacaaaacgtagtatccggcaccaccctgaacttaagattcttagaaatttgaacattgatatt

SEQ ID NO: 16430 - DNA, 80 bp, synthetic construct
  misc_feature 1..80: note = Synthetic: >HKU1-cand-20150-20229
  source 1..80: mol_type = other DNA
tgttggaagcatgtcctgtgggattatgttaaagatagtttgttttgtagttccacttatggtgtttgtaaatacacaga

SEQ ID NO: 16431 - DNA, 80 bp, synthetic construct
  misc_feature 1..80: note = Synthetic: >HKU1-cand-20230-20309
  source 1..80: mol_type = other DNA
tttgaagttcatcgaaaatttgaatatactttttgatggtcgtgacactggcgctttagaagcttttagaaaagcaagaa

SEQ ID NO: 16432 - DNA, 80 bp, synthetic construct
  misc_feature 1..80: note = Synthetic: >HKU1-cand-20310-20389
  source 1..80: mol_type = other DNA
atggtgtttttattagtactgaaaaattaagtaggttatcaatgattaaaggtccgcaacgagctgatttaaatggtgtg

SEQ ID NO: 16433 - DNA, 80 bp, synthetic construct
  misc_feature 1..80: note = Synthetic: >HKU1-cand-20390-20469
  source 1..80: mol_type = other DNA
attgtggataaagttggagaactcaaagttgagttttggttcgctatgagaaaagatggtgacgatgttatcttcagccg

SEQ ID NO: 16434 - DNA, 80 bp, synthetic construct
  misc_feature 1..80: note = Synthetic: >HKU1-cand-20470-20549
  source 1..80: mol_type = other DNA
aacagacagcctatgctcaagccattactggagcccacaaggtaatctaggtggtaattgcgcgggtaatgtcattggta

SEQ ID NO: 16435 - DNA, 80 bp, synthetic construct
  misc_feature 1..80: note = Synthetic: >HKU1-cand-20550-20629
  source 1..80: mol_type = other DNA
atgatgctctaacacgttttactatctttactcagagtcgtgtattgtcaagttttgaacctcgctcagatttagaacgg

SEQ ID NO: 16436 - DNA, 80 bp, synthetic construct
  misc_feature 1..80: note = Synthetic: >HKU1-cand-20630-20709
  source 1..80: mol_type = other DNA
gattttattgatatggatgataatctgtttattgctaaatatggtttagaagactatgcatttgatcatatagtttatgg

SEQ ID NO: 16437 - DNA, 80 bp, synthetic construct
  misc_feature 1..80: note = Synthetic: >HKU1-cand-20710-20789
  source 1..80: mol_type = other DNA
tagttttaaccataaagttataggaggtttgcatttgcttataggcttatttcgtaggctaaaaaaatctaatttgttaa

SEQ ID NO: 16438 - DNA, 80 bp, synthetic construct
  misc_feature 1..80: note = Synthetic: >HKU1-cand-20790-20869
  source 1..80: mol_type = other DNA
ttcaagagtttttacagtatgattctagtattcattcatattttattactgatcaggagtgtggtagtagtaagagtgtt

SEQ ID NO: 16439 - DNA, 80 bp, synthetic construct
  misc_feature 1..80: note = Synthetic: >HKU1-cand-20870-20949
  source 1..80: mol_type = other DNA
tgtacagttattgatttattattagatgattttgtttctattgttaagtcattaaatttgagttgtgttagtaaagttgt

SEQ ID NO: 16440 - DNA, 80 bp, synthetic construct
  misc_feature 1..80: note = Synthetic: >HKU1-cand-20950-21029
  source 1..80: mol_type = other DNA
taatattaatgttgattttaaggattttcaatttatgttgtggtgtaatgataataaaattatgactttttatcctaaaa

SEQ ID NO: 16441 - DNA, 80 bp, synthetic construct
  misc_feature 1..80: note = Synthetic: >HKU1-cand-21030-21109
  source 1..80: mol_type = other DNA
tgcaagccactaatgattggaaacctggctattctatgcctgttttgtataagtatttgaatgttccattagagagagtc

SEQ ID NO: 16442 - DNA, 80 bp, synthetic construct
  misc_feature 1..80: note = Synthetic: >HKU1-cand-21110-21189
  source 1..80: mol_type = other DNA
tctttatggaattatggtaaacctattaatttgcctacaggctgtatgatgaatgttgctaagtacactcaattatgtca

SEQ ID NO: 16443 - DNA, 80 bp, synthetic construct
  misc_feature 1..80: note = Synthetic: >HKU15-cand-7760-7839
  source 1..80: mol_type = other DNA
ctgtagctaagacagctgggaaattttcttccttcttagacgcagctaaagctacttttgtcattgacaatgaaaagtac

SEQ ID NO: 16444 - DNA, 80 bp, synthetic construct
  misc_feature 1..80: note = Synthetic: >HKU15-cand-7920-7999
  source 1..80: mol_type = other DNA
tgcttctgataaggattatgataaggtctgtatggcatttcttgccaaggctttgtcatcttttcgtgaaggaggcggtt

SEQ ID NO: 16445 - DNA, 80 bp, synthetic construct
  misc_feature 1..80: note = Synthetic: >HKU15-cand-8320-8399
  source 1..80: mol_type = other DNA
ttaactgttcataccaacaacacagccactccagactataagtttgaaaggctccaaccaggatcatcgatgacaattgc

SEQ ID NO: 16446 - DNA, 80 bp, synthetic construct
  misc_feature 1..80: note = Synthetic: >HKU15-cand-8400-8479
  source 1..80: mol_type = other DNA
ttgtgcttatgatggcattgtacggcatgtctatcacgtggtcctccaacttaataatcttatttatgcaagcttcctta

SEQ ID NO: 16447 - DNA, 80 bp, synthetic construct
  misc_feature 1..80: note = Synthetic: >HKU2-cand-2910-2989
  source 1..80: mol_type = other DNA
attcttgtgaaactggcatatatccctatgctagtgatggtaaagttttgccattgcggtttaggaaaaaggctggtggt

SEQ ID NO: 16448 - DNA, 80 bp, synthetic construct
  misc_feature 1..80: note = Synthetic: >HKU2-cand-2990-3069
  source 1..80: mol_type = other DNA
aagaatgttgcctttgatgacaatgttacagttactgagattgaccctatttttaaggttaaactgtcctttgagtttga

SEQ ID NO: 16449 - DNA, 80 bp, synthetic construct
  misc_feature 1..80: note = Synthetic: >HKU2-cand-3070-3149
  source 1..80: mol_type = other DNA
ggatgaaaaattgattgaactttgtaagaaggttattggtagcaaagttaagtgtagttcctggtcccaacttgttgaga

SEQ ID NO: 16450 - DNA, 80 bp, synthetic construct
  misc_feature 1..80: note = Synthetic: >HKU2-cand-3150-3229
  source 1..80: mol_type = other DNA
tcattgatactgctcttactgcaactaagtcatactacaatgttccagaatattttatctatgatgaggaaggtggtaat

SEQ ID NO: 16451 - DNA, 80 bp, synthetic construct
  misc_feature 1..80: note = Synthetic: >HKU2-cand-3230-3309
  source 1..80: mol_type = other DNA
gaccttaatttggatgtcatgatctctgaatggcctttgcaggttgacgaggtcagtgaattagttagcactgatgagac

SEQ ID NO: 16452 - DNA, 80 bp, synthetic construct
  misc_feature 1..80: note = Synthetic: >HKU2-cand-3310-3389
  source 1..80: mol_type = other DNA
agttgaagagcaagctgttgaacaagtagagccagttgttgaagatgtaagtgatatcattgaggtaaacaaggcttttg

SEQ ID NO: 16453 - DNA, 80 bp, synthetic construct
  misc_feature 1..80: note = Synthetic: >HKU2-cand-3390-3469
  source 1..80: mol_type = other DNA
ctattgatgattcaccagagagagctattagtccatttggttttgacacaaatgagattaatggacggcgtgtgcttgta

SEQ ID NO: 16454 - DNA, 80 bp, synthetic construct
  misc_feature 1..80: note = Synthetic: >HKU2-cand-3470-3549
  source 1..80: mol_type = other DNA
cagtctaacaacaactgttgggttaatgctgcttgttatcagttacaagttctaggttttgacagcccagctatggaact

SEQ ID NO: 16455 - DNA, 80 bp, synthetic construct
  misc_feature 1..80: note = Synthetic: >HKU2-cand-3550-3629
  source 1..80: mol_type = other DNA
ttatagagttggtggcacacataatcttgttaagcaatgttacgaggccactggtgcatttttaggttctttgggtgatg

SEQ ID NO: 16456 - DNA, 80 bp, synthetic construct
  misc_feature 1..80: note = Synthetic: >HKU2-cand-3630-3709
  source 1..80: mol_type = other DNA
ttgcacattgtttagaggtattgcttaaggatgctaagacagccaaagttactgttgaagttacttgtgattgttcatct

SEQ ID NO: 16457 - DNA, 80 bp, synthetic construct
  misc_feature 1..80: note = Synthetic: >HKU2-cand-3710-3789
  source 1..80: mol_type = other DNA
aacttcgaagaacttagcggtgctttctttaggtttttgcctcttaagagtaagtttgaatatggtagttgctttgcttg

SEQ ID NO: 16458 - DNA, 80 bp, synthetic construct
  misc_feature 1..80: note = Synthetic: >HKU2-cand-3790-3869
  source 1..80: mol_type = other DNA
tcatggcactcgttattatcgtgtgtgtggtattgttggctctgcaatattttcacagactcttaagccattggatttca

SEQ ID NO: 16459 - DNA, 80 bp, synthetic construct
  misc_feature 1..80: note = Synthetic: >HKU2-cand-3870-3949
  source 1..80: mol_type = other DNA
atgacctgatctgtgatgttgctagtgctagcgtctttcttggtgatgattgtggtcattatttaattaatgactacgac

SEQ ID NO: 16460 - DNA, 80 bp, synthetic construct
  misc_feature 1..80: note = Synthetic: >HKU2-cand-3950-4029
  source 1..80: mol_type = other DNA
aagagactatgtgtcgatggtatgggtgtttacaagattaagcataacaccattgacacaatagttgttaaggacgccga

SEQ ID NO: 16461 - DNA, 80 bp, synthetic construct
  misc_feature 1..80: note = Synthetic: >HKU2-cand-4030-4109
  source 1..80: mol_type = other DNA
tattaagccttctactgtggcaccttttatcgagtactgtaatgtgaagttctaccagggtgattttaaagatcttgctg

SEQ ID NO: 16462 - DNA, 80 bp, synthetic construct
  misc_feature 1..80: note = Synthetic: >HKU2-cand-4110-4189
  source 1..80: mol_type = other DNA
gtttgtctcatgactttgtagttaatgcagcaaattgcaacttggcccacggtggtggtgtagctaaggctatagatcat

SEQ ID NO: 16463 - DNA, 80 bp, synthetic construct
  misc_feature 1..80: note = Synthetic: >HKU31-cand-25860-25939
  source 1..80: mol_type = other DNA
gaacatacactaacactaaattgtcctaccctgtgtttgataatgatggtgttaagtattatgatgcaacacaagaccgc

SEQ ID NO: 16464 - DNA, 80 bp, synthetic construct
  misc_feature 1..80: note = Synthetic: >HKU31-cand-25940-26019
  source 1..80: mol_type = other DNA
gatgctacacctagttatgagcatagtgaattttacgaacttgatgaatccagtttctctgctaaaccagttttggcaga

SEQ ID NO: 16465 - DNA, 80 bp, synthetic construct
  misc_feature 1..80: note = Synthetic: >HKU31-cand-26020-26099
  source 1..80: mol_type = other DNA
ggtataatagtgtcatcaacacagctgagaattgggtaggaccacctcagtattcattttatcctgtgttaaacacagct

SEQ ID NO: 16466 - DNA, 80 bp, synthetic construct
  misc_feature 1..80: note = Synthetic: >HKU31-cand-26100-26179
  source 1..80: mol_type = other DNA
tctaatactatccagtggttttgtactgcaacctttttaggaaatacagtgcaaaccctagataatactaaagctctagc

SEQ ID NO: 16467 - DNA, 80 bp, synthetic construct
  misc_feature 1..80: note = Synthetic: >HKU31-cand-26180-26259
  source 1..80: mol_type = other DNA
taaacaacaagctgcacaacaactcattcaaaacattaatgatggagtgtagtgctgtagacgtattaacacgtcctaat

SEQ ID NO: 16468 - DNA, 80 bp, synthetic construct
  misc_feature 1..80: note = Synthetic: >HKU31-cand-26260-26339
  source 1..80: mol_type = other DNA
gaaattagaaacaggcgctatgataagcgccgtttctctcctattcgtgtaagtgatttgcatgttgctaaacaacctac

SEQ ID NO: 16469 - DNA, 80 bp, synthetic construct
  misc_feature 1..80: note = Synthetic: >HKU31-cand-26340-26419
  source 1..80: mol_type = other DNA
acattacctgcgtgtaacttttcctcccacaccacaatggactgttagaagaggacttacaatggaagatgttgagatct

SEQ ID NO: 16470 - DNA, 80 bp, synthetic construct
  misc_feature 1..80: note = Synthetic: >HKU31-cand-26420-26499
  source 1..80: mol_type = other DNA
ggctgtctaattatgacgcaaaaccagtcactcaatatcatattacattagcactccttgtcttggaaaaagatgagagc

SEQ ID NO: 16471 - DNA, 80 bp, synthetic construct
  misc_feature 1..80: note = Synthetic: >HKU31-cand-26500-26579
  source 1..80: mol_type = other DNA
attcctgatatcactaactttgctaacatgcttaagggtgttagatttgagttaaaagactttaatgtgcttggcagaac

SEQ ID NO: 16472 - DNA, 80 bp, synthetic construct
  misc_feature 1..80: note = Synthetic: >HKU31-cand-26580-26659
  source 1..80: mol_type = other DNA
tcttgttcttaatgctaccgaactggtttgtgaaaatccttaccagtatgatcttagcaatttgcaagaaaaggtggtac

SEQ ID NO: 16473 - DNA, 80 bp, synthetic construct
  misc_feature 1..80: note = Synthetic: >HKU31-cand-26660-26739
  source 1..80: mol_type = other DNA
cttgcattaaacaactgctgtcattgcaacgttatagcgtgcatgatagtggtttacctttacatttatcagttagcaaa

SEQ ID NO: 16474 - DNA, 80 bp, synthetic construct
  misc_feature 1..80: note = Synthetic: >HKU31-cand-26740-26819
  source 1..80: mol_type = other DNA
ttgcatgatttagagcctcaaattagggctcatatcagcaatgttgtttcctatcgtcctacatgttttgtagcaaagcc

SEQ ID NO: 16475 - DNA, 80 bp, synthetic construct
  misc_feature 1..80: note = Synthetic: >HKU31-cand-26820-26899
  source 1..80: mol_type = other DNA
cacaacgatagagcttgtaacaacacgtgcttttaatggagacacacctaaggttgtcatgtctgtgcctatatattaag

SEQ ID NO: 16476 - DNA, 80 bp, synthetic construct
  misc_feature 1..80: note = Synthetic: >HKU31-cand-26900-26979
  source 1..80: mol_type = other DNA
aacgaactatggcttacacactttctttatttaaaccagtgcaagctgtagttttagcttctccggagctaataagcaat

SEQ ID NO: 16477 - DNA, 80 bp, synthetic construct
  misc_feature 1..80: note = Synthetic: >HKU31-cand-26980-27059
  source 1..80: mol_type = other DNA
aatcacgaaagtgtggcatacaattgaatgtagaccgttcacaaattatgttaacatgcatcccaattcaagcttatact

SEQ ID NO: 16478 - DNA, 80 bp, synthetic construct
  misc_feature 1..80: note = Synthetic: >HKU4-cand-22490-22569
  source 1..80: mol_type = other DNA
acactgttatacccagaagttttcggtctaaagctaacaaaagagaggcttgggctgcattttatgtgtataaattacat

SEQ ID NO: 16479 - DNA, 80 bp, synthetic construct
  misc_feature 1..80: note = Synthetic: >HKU4-cand-22570-22649
  source 1..80: mol_type = other DNA
cagctgacttacttgttagatttttctgttgatggttatatacgtagagctatagattgtggacatgatgatttgtcaca

SEQ ID NO: 16480 - DNA, 80 bp, synthetic construct
  misc_feature 1..80: note = Synthetic: >HKU4-cand-22650-22729
  source 1..80: mol_type = other DNA
gctccattgttcttatacatcttttgaagttgacactggtgtctattctgtttcttcatatgaagcttcagctactggca

SEQ ID NO: 16481 - DNA, 80 bp, synthetic construct
  misc_feature 1..80: note = Synthetic: >HKU4-cand-22730-22809
  source 1..80: mol_type = other DNA
cctttattgaacaacctaatgctactgagtgtgatttttcacctatgcttacaggtgtagctcctcaggtttataatttt

SEQ ID NO: 16482 - DNA, 80 bp, synthetic construct
  misc_feature 1..80: note = Synthetic: >HKU4-cand-22810-22889
  source 1..80: mol_type = other DNA
aaaaggttggttttttccaattgtaattataatcttactaaactcctctctttgtttgcagttgatgagttttcttgtaa

SEQ ID NO: 16483 - DNA, 80 bp, synthetic construct
  misc_feature 1..80: note = Synthetic: >HKU4-cand-22890-22969
  source 1..80: mol_type = other DNA
tggaatttcacctgatgctattgcacgtggttgttattctactttaacagtggattattttgcctatccacttagtatga

SEQ ID NO: 16484 - DNA, 80 bp, synthetic construct
  misc_feature 1..80: note = Synthetic: >HKU4-cand-22970-23049
  source 1..80: mol_type = other DNA
agtcatatatcagacctggttctgcaggcaatataccactttacaattataaacagtcttttgccaatcctacgtgtaga

SEQ ID NO: 16485 - DNA, 80 bp, synthetic construct
  misc_feature 1..80: note = Synthetic: >HKU4-cand-23050-23129
  source 1..80: mol_type = other DNA
gttatggcatctgttcctgctaatgttactattactaagcctcatgcttatggttatatttccaagtgttctcgtctgac

SEQ ID NO: 16486 - DNA, 80 bp, synthetic construct
  misc_feature 1..80: note = Synthetic: >HKU4-cand-23130-23209
  source 1..80: mol_type = other DNA
tggtgcaaaccaagatgttgaaacaccattatatattaaccctggtgagtactctatttgtagagatttttctcctgggg

SEQ ID NO: 16487 - DNA, 80 bp, synthetic construct
  misc_feature 1..80: note = Synthetic: >HKU4-cand-23210-23289
  source 1..80: mol_type = other DNA
gtttttctgaagatggtcaggtcttcaagcgtactcttacccaattcgagggtggtggcttgcttattggagttggcact

SEQ ID NO: 16488 - DNA, 80 bp, synthetic construct
  misc_feature 1..80: note = Synthetic: >HKU4-cand-23290-23369
  source 1..80: mol_type = other DNA
agagtacctatgactgataacttacaaatgagttttataatctctgtccaatatggtaccggcaccgatagtgtttgccc

SEQ ID NO: 16489 - DNA, 80 bp, synthetic construct
  misc_feature 1..80: note = Synthetic: >HKU4-cand-23370-23449
  source 1..80: mol_type = other DNA
catgttggacttaggtgattctttaactatcactaaccgtttaggtaagtgtgtagattattcactctatggtgttactg

SEQ ID NO: 16490 - DNA, 80 bp, synthetic construct
  misc_feature 1..80: note = Synthetic: >HKU4-cand-23450-23529
  source 1..80: mol_type = other DNA
gtagaggtgtttttcaaaactgtactgccgttggtgttaaacagcagcgttttgtttatgatagctttgacaatttagtt

SEQ ID NO: 16491 - DNA, 80 bp, synthetic construct
  misc_feature 1..80: note = Synthetic: >HKU4-cand-23530-23609
  source 1..80: mol_type = other DNA
ggttactattctgatgatggtaactactattgtgtcagaccttgtgtcagtgtacctgtgtctgttatatatgataaaag

SEQ ID NO: 16492 - DNA, 80 bp, synthetic construct
  misc_feature 1..80: note = Synthetic: >HKU4-cand-23610-23689
  source 1..80: mol_type = other DNA
tacaaatttacatgcgactttattcggtagtgttgcttgtgagcacgttactacaatgatgtcgcaattttcacgcctta

SEQ ID NO: 16493 - DNA, 80 bp, synthetic construct
  misc_feature 1..80: note = Synthetic: >HKU4-cand-23690-23769
  source 1..80: mol_type = other DNA
ctcaaagtaatttacgtaggcgtgattctaatatacctcttcaaacagctgttggttgtgttataggtctttctaataac

SEQ ID NO: 16494 - DNA, 80 bp, synthetic construct
  misc_feature 1..80: note = Synthetic: >HKU9-cand-21930-22009
  source 1..80: mol_type = other DNA
ataaaaatgatgccaattgtcttgcttttcagaataatttgtatatagcacctttaagtaaacgtgaattgttagtgtct

SEQ ID NO: 16495 - DNA, 80 bp, synthetic construct
  misc_feature 1..80: note = Synthetic: >HKU9-cand-22010-22089
  source 1..80: mol_type = other DNA
tataatgataatggcttgccaattaatgtagctgattgtgcggacgatgcaggtgatgagctatattgtgttacaggctc

SEQ ID NO: 16496 - DNA, 80 bp, synthetic construct
  misc_feature 1..80: note = Synthetic: >HKU9-cand-22090-22169
  source 1..80: mol_type = other DNA
atttgaacctcagattggtgtttaccctttaagtaggtaccgagctcaggttagtgattatgtgcacattacgcagcaag

SEQ ID NO: 16497 - DNA, 80 bp, synthetic construct
  misc_feature 1..80: note = Synthetic: >HKU9-cand-22170-22249
  source 1..80: mol_type = other DNA
ctaagacctgtaaactgccttatgctgacattgtaaaaccacctcaacctattgtctggcgtcgatatacagtgactaat

SEQ ID NO: 16498 - DNA, 80 bp, synthetic construct
  misc_feature 1..80: note = Synthetic: >HKU9-cand-22250-22329
  source 1..80: mol_type = other DNA
tgctcatttgactttgaggctattgttaatagtttacctacttatgagctcaaatgctatggtgtatcacctgcgcggtt

SEQ ID NO: 16499 - DNA, 80 bp, synthetic construct
  misc_feature 1..80: note = Synthetic: >HKU9-cand-22330-22409
  source 1..80: mol_type = other DNA
ggcacaaatgtgctatgccagtgttactctggacgttatgcgcataaataagacgcatctgactaatttgattggtaatg

SEQ ID NO: 16500 - DNA, 80 bp, synthetic construct
  misc_feature 1..80: note = Synthetic: >HKU9-cand-22410-22489
  source 1..80: mol_type = other DNA
tgcctgatgtatttagtaagtataattatgcactgccaaccaatttttatggttgtgtgcatgcatattatattaatgtt

SEQ ID NO: 16501 - DNA, 80 bp, synthetic construct
  misc_feature 1..80: note = Synthetic: >HKU9-cand-22490-22569
  source 1..80: mol_type = other DNA
actgatggccgctatgctatagcgaatcagtggccggccactgttattacaccaggtggccgacagccttataatagtta

SEQ ID NO: 16502 - DNA, 80 bp, synthetic construct
  misc_feature 1..80: note = Synthetic: >HKU9-cand-22570-22649
  source 1..80: mol_type = other DNA
tgttggtactgttttgaatacaccggctaataacaggtgcaccaaacctaattgttttggtctggtagttatagcattta

SEQ ID NO: 16503 - DNA, 80 bp, synthetic construct
  misc_feature 1..80: note = Synthetic: >HKU9-cand-22650-22729
  source 1..80: mol_type = other DNA
agcctgcatcaggtaggcagctagtttgccctaaggctaatgatactgatgttataacgcaccaatgtgttaagtataat

SEQ ID NO: 16504 - DNA, 80 bp, synthetic construct
  misc_feature 1..80: note = Synthetic: >HKU9-cand-22730-22809
  source 1..80: mol_type = other DNA
ctgtatggttacactggtactggcgttttaaaaaacacgtctactttaaccataccagatggtaagttgtttgtggctaa

SEQ ID NO: 16505 - DNA, 80 bp, synthetic construct
  misc_feature 1..80: note = Synthetic: >HKU9-cand-22810-22889
  source 1..80: mol_type = other DNA
taacacaggtgatattattgctgttaatgttaatggcaccgtttatggtattacaccttgtgtgtcagtgcctgtatctg

SEQ ID NO: 16506 - DNA, 80 bp, synthetic construct
  misc_feature 1..80: note = Synthetic: >HKU9-cand-22890-22969
  source 1..80: mol_type = other DNA
taggatataacccttcttttgagcgggcgctactatttaatggtttagcttgtacagagcgcgcagttgctgttaacatg

SEQ ID NO: 16507 - DNA, 80 bp, synthetic construct
  misc_feature 1..80: note = Synthetic: >HKU9-cand-22970-23049
  source 1..80: mol_type = other DNA
ccggcatcaacttactggctagcggtgtctagagatgcagctcaacctgatactggtgtagttacatttgacacaccttc

SEQ ID NO: 16508 - DNA, 80 bp, synthetic construct
  misc_feature 1..80: note = Synthetic: >HKU9-cand-23050-23129
  source 1..80: mol_type = other DNA
tggttgtgtgtataatgtacgcaatgcaactactatggtagttaattcgtgtgatatgccttttggtaacagcctatgtt

SEQ ID NO: 16509 - DNA, 80 bp, synthetic construct
  misc_feature 1..80: note = Synthetic: >HKU9-cand-23130-23209
  source 1..80: mol_type = other DNA
taactaatgtaactcaaccctcgcagtatgctatctgaaagtactacagatagtttacactaggttgagtttagtcactt

SEQ ID NO: 16510 - DNA, 80 bp, synthetic construct
  misc_feature 1..80: note = Synthetic: >HKU9-cand-25810-25889
  source 1..80: mol_type = other DNA
acttgtggttgtttgtttagtataatttgcaaacctactattttagtgtacaacaaatttaaaaacgaatcactcttgaa

SEQ ID NO: 16511 - DNA, 80 bp, synthetic construct
  misc_feature 1..80: note = Synthetic: >HKU9-cand-25890-25969
  source 1..80: mol_type = other DNA
cgaacaagaagagcttttaatttagacagtatgacgatgtgcaataattctaatgacacattatcccagactgaggttgt

SEQ ID NO: 16512 - DNA, 80 bp, synthetic construct
  misc_feature 1..80: note = Synthetic: >HKU9-cand-25970-26049
  source 1..80: mol_type = other DNA
tgctgctataaaagactggaattttgcagtttcagtccttctcttgtttataactgttttgctccagtggggttatccct

SEQ ID NO: 16513 - DNA, 80 bp, synthetic construct
  misc_feature 1..80: note = Synthetic: >HKU9-cand-26050-26129
  source 1..80: mol_type = other DNA
ctcggtgcaaaccgttatgggtagttaagatgtgtatactgtggctattatggccactttctattgcagcagccgttttt

SEQ ID NO: 16514 - DNA, 80 bp, synthetic construct
  misc_feature 1..80: note = Synthetic: >HKU9-cand-26130-26209
  source 1..80: mol_type = other DNA
gcggccgtctacccaataaacccagttgcttttggctttgccattgcatttgcgtgtatttcagggcttatgtggttgag

SEQ ID NO: 16515 - DNA, 80 bp, synthetic construct
  misc_feature 1..80: note = Synthetic: >HKU9-cand-26210-26289
  source 1..80: mol_type = other DNA
ctattttattagctccttccgcttgctatgtagaactggttcaggttcagcatggtctttcatgccggaaactaatatgt

SEQ ID NO: 16516 - DNA, 80 bp, synthetic construct
  misc_feature 1..80: note = Synthetic: >HKU9-cand-26290-26369
  source 1..80: mol_type = other DNA
tgctgaacgtaccactatcgggccgtacagtgacacgtcctatacttgctgactcaccagctatacaatttttgattttg

SEQ ID NO: 16517 - DNA, 80 bp, synthetic construct
  misc_feature 1..80: note = Synthetic: >HKU9-cand-26370-26449
  source 1..80: mol_type = other DNA
cgtggtgaaattcagtttgatggcttcaagcttggccgctgtgacccgggagagatgcccgatattgtcacagttgcaaa

SEQ ID NO: 16518 - DNA, 80 bp, synthetic construct
  misc_feature 1..80: note = Synthetic: >HKU9-cand-26450-26529
  source 1..80: mol_type = other DNA
accagcgtcgcttcattggtataagaaggcacttactagaaatataggtgctaaatctgcgattattgtttacattaaat

SEQ ID NO: 16519 - DNA, 80 bp, synthetic construct
  misc_feature 1..80: note = Synthetic: >HKU9-cand-26530-26609
  source 1..80: mol_type = other DNA
ataaagtaggcaatcatcgcgtgcagaataccaatgaagatggcgagcgtttagctatgtttgttgcttaaagaaatact

SEQ ID NO: 16520 - DNA, 80 bp, synthetic construct
  misc_feature 1..80: note = Synthetic: >HKU9-cand-26610-26689
  source 1..80: mol_type = other DNA
cagaataacacatgttgtaaatatttccttctttatagtttgaacgaacctattatgtctggacggaataagccccgccc

SEQ ID NO: 16521 - DNA, 80 bp, synthetic construct
  misc_feature 1..80: note = Synthetic: >HKU9-cand-26690-26769
  source 1..80: mol_type = other DNA
tagcaatcaatcacctaaggtgacgttcaaacaagaatctgacggttctgactccgaatctgaacgccgtaatggtaacc

SEQ ID NO: 16522 - DNA, 80 bp, synthetic construct
  misc_feature 1..80: note = Synthetic: >HKU9-cand-26770-26849
  source 1..80: mol_type = other DNA
gttctggtgcccgtcctaaaaataataatagtagaggtggtgctcccaagcctgagaagcctaaggcagcccctccgcag

SEQ ID NO: 16523 - DNA, 80 bp, synthetic construct
  misc_feature 1..80: note = Synthetic: >HKU9-cand-26850-26929
  source 1..80: mol_type = other DNA
aatgtttcttggtttgctccgcttgttcagacaggaaagcaagatttgcgcttcccacggggagagggtgtgcccataag

SEQ ID NO: 16524 - DNA, 80 bp, synthetic construct
  misc_feature 1..80: note = Synthetic: >HKU9-cand-26930-27009
  source 1..80: mol_type = other DNA
tcagggtgttgaccctatttataatcatggttactgggtgcgcacacagcgcactttccagaagggtggaaaaccagttc

SEQ ID NO: 16525 - DNA, 80 bp, synthetic construct
  misc_feature 1..80: note = Synthetic: >HKU9-cand-27010-27089
  source 1..80: mol_type = other DNA
aggctaaccctcgctggtacttttattatacaggcacaggtcgttatggcgacctccgctatggtacgaagaacccagac

SEQ ID NO: 16526 - DNA, 80 bp, synthetic construct
  misc_feature 1..80: note = Synthetic: >Lucheng19-cand-19210-19289
  source 1..80: mol_type = other DNA
accttaacttcggctatctcaatggcgtacctgtgtccaccactgatgtcgaggttgatggtgaaatagttaagaaaaaa

SEQ ID NO: 16527 - DNA, 80 bp, synthetic construct
  misc_feature 1..80: note = Synthetic: >Lucheng19-cand-19290-19369
  source 1..80: mol_type = other DNA
gtagatctgtatctttatgtccgtaaaaacggccaatttgttgaacaatttgacggattctatagccagggccgcaccgt

SEQ ID NO: 16528 - DNA, 80 bp, synthetic construct
  misc_feature 1..80: note = Synthetic: >Lucheng19-cand-19370-19449
  source 1..80: mol_type = other DNA
gacgacatttaaaccacgtagcacaatggaaactgactttttagaactagatacagatatatttattaataaatatggtc

SEQ ID NO: 16529 - DNA, 80 bp, synthetic construct
  misc_feature 1..80: note = Synthetic: >Lucheng19-cand-19530-19609
  source 1..80: mol_type = other DNA
caaataagacttgctagaataggttatttgaagattgaagattttggcggcaattctgacagcactattaagtgctgcag

SEQ ID NO: 16530 - DNA, 80 bp, synthetic construct
  misc_feature 1..80: note = Synthetic: >Lucheng19-cand-19610-19689
  source 1..80: mol_type = other DNA
tgttacctatatagaaaactctagcaaggttgtttgtagttatgtagaccttctactagatgattttgttaccatcctaa

SEQ ID NO: 16531 - DNA, 80 bp, synthetic construct
  misc_feature 1..80: note = Synthetic: >Lucheng19-cand-19690-19769
  source 1..80: mol_type = other DNA
agagcttggatttatctgttgtttctaaagtgcatgaagttgtaatagacggcaaaccatggcgctggatgttatggtgc

SEQ ID NO: 16532 - DNA, 80 bp, synthetic construct
  misc_feature 1..80: note = Synthetic: >Lucheng19-cand-19770-19849
  source 1..80: mol_type = other DNA
aaagataacaaagtagccacattctatccacaactacagaacagtgagtggaaatgtggctactctatgccaccacttta

SEQ ID NO: 16533 - DNA, 80 bp, synthetic construct
  misc_feature 1..80: note = Synthetic: >Lucheng19-cand-19850-19929
  source 1..80: mol_type = other DNA
caaaatccagagcatgattctggcaccatgcagtctttacaactatggcaagtccattaaactaccagagggtataatgt

SEQ ID NO: 16534 - DNA, 80 bp, synthetic construct
  misc_feature 1..80: note = Synthetic: >Lucheng19-cand-20010-20089
  source 1..80: mol_type = other DNA
catctaggagcgggatcggataagggcgtcgccccaggcacagcagtcctaaagaattggctaccagaagacgctctcct

SEQ ID NO: 16535 - DNA, 80 bp, synthetic construct
  misc_feature 1..80: note = Synthetic: >Lucheng19-cand-20090-20169
  source 1..80: mol_type = other DNA
ggttgacaacgatctatatgactacgtctctgatgctgatataagctatacaggtgattgctgctctatgtatctggaag

SEQ ID NO: 16536 - DNA, 80 bp, synthetic construct
  misc_feature 1..80: note = Synthetic: >Lucheng19-cand-20170-20249
  source 1..80: mol_type = other DNA
acaagttcgatcttgtaatatcagatatgtatgatggtaaaacaaaacagattgatggagacaatgtttccaaggagggc

SEQ ID NO: 16537 - DNA, 80 bp, synthetic construct
  misc_feature 1..80: note = Synthetic: >Lucheng19-cand-20250-20329
  source 1..80: mol_type = other DNA
ttcttcgtttatataaatggtgttataacagaaaaactgtcccttggaggtacggtcgccatcaaaataacagaatttag

SEQ ID NO: 16538 - DNA, 80 bp, synthetic construct
  misc_feature 1..80: note = Synthetic: >Lucheng19-cand-20330-20409
  source 1..80: mol_type = other DNA
ctggaatagaaagctctatgaattaattcagaaatttgaatattggactgtgttctgtaccagtgtaaatacttcatcct

SEQ ID NO: 16539 - DNA, 80 bp, synthetic construct
  misc_feature 1..80: note = Synthetic: >Lucheng19-cand-20410-20489
  source 1..80: mol_type = other DNA
ctgaagggtttctcataggcgtaaactatctggggaactttagtgataagccgattattgatggctgtactatgcacgca

SEQ ID NO: 16540 - DNA, 80 bp, synthetic construct
  misc_feature 1..80: note = Synthetic: >Lucheng19-cand-23040-23119
  source 1..80: mol_type = other DNA
taggttacctgtattcaggcgccaagtgtaacaccactgatgtaacaacatttacaactaaggccagagccacaacactc

SEQ ID NO: 16541 - DNA, 80 bp, synthetic construct
  misc_feature 1..80: note = Synthetic: >Lucheng19-cand-23120-23199
  source 1..80: mol_type = other DNA
acagatagcacactgggttgtctgatagacgtaaaactaacaaataacaattacaccaaatgcagaaaccctataggaaa

SEQ ID NO: 16542 - DNA, 80 bp, synthetic construct
  misc_feature 1..80: note = Synthetic: >Lucheng19-cand-23200-23279
  source 1..80: mol_type = other DNA
tgggctctgtgctgatgttaatgtaacaggtaaaccagttgtaggcaacatatacatacagactcatgacactgactatg

SEQ ID NO: 16543 - DNA, 80 bp, synthetic construct
  misc_feature 1..80: note = Synthetic: >Lucheng19-cand-23280-23359
  source 1..80: mol_type = other DNA
ctaggccaattcttactccacagaaaatagaactgccaatggaccacgacatcaatgtcaaagagcagtttattcaaaca

SEQ ID NO: 16544 - DNA, 80 bp, synthetic construct
  misc_feature 1..80: note = Synthetic: >Lucheng19-cand-23360-23439
  source 1..80: mol_type = other DNA
acaacacccaagtttgatgtcgattgtgaaaggtacatctgcgacgtatccagccagtgcaacgaactgcttgcaaagta

SEQ ID NO: 16545 - DNA, 80 bp, synthetic construct
  misc_feature 1..80: note = Synthetic: >Lucheng19-cand-23440-23519
  source 1..80: mol_type = other DNA
tggtggctactgccccaaaatacttacagatattaaatcttcaagcatgcagctggattaccaaatgcagggcatataca

SEQ ID NO: 16546 - DNA, 80 bp, synthetic construct
  misc_feature 1..80: note = Synthetic: >Lucheng19-cand-23520-23599
  source 1..80: mol_type = other DNA
aaaccctaaatgttgatgttaaggtacctgatattgattttggtgaatttaacttcagcatgtataaatcagaacccaat

SEQ ID NO: 16547 - DNA, 80 bp, synthetic construct
  misc_feature 1..80: note = Synthetic: >Lucheng19-cand-23600-23679
  source 1..80: mol_type = other DNA
ggaagatcctttattgaggacatactctttgataaaatagtgactacaggtccagggttttatcaagactactatgattg

SEQ ID NO: 16548 - DNA, 80 bp, synthetic construct
  misc_feature 1..80: note = Synthetic: >Lucheng19-cand-23680-23759
  source 1..80: mol_type = other DNA
caagaagatgaatctgcaagacatcacctgcaaacagtattataatggtattatggtgataccacccgtcatggatgaca

SEQ ID NO: 16549 - DNA, 80 bp, synthetic construct
  misc_feature 1..80: note = Synthetic: >Lucheng19-cand-23760-23839
  source 1..80: mol_type = other DNA
cactcatcaccttctggtcatcagccgttgcaggctccatgacagcaggcctctttggtggtcaagcaggtatggtgtcc

SEQ ID NO: 16550 - DNA, 80 bp, synthetic construct
  misc_feature 1..80: note = Synthetic: >Lucheng19-cand-23840-23919
  source 1..80: mol_type = other DNA
tggaccatagcacttgcaggcagactcaatgcacttggcgttatgcaagacgcacttgtcaaggacgttaataaacttgc

SEQ ID NO: 16551 - DNA, 80 bp, synthetic construct
  misc_feature 1..80: note = Synthetic: >Lucheng19-cand-24000-24079
  source 1..80: mol_type = other DNA
ttgttaacaataatgcacagcaaatctcccagctagtccaaggactaagcgagaacttcggtgctattagtaacaacttt

SEQ ID NO: 16552 - DNA, 80 bp, synthetic construct
  misc_feature 1..80: note = Synthetic: >Lucheng19-cand-24080-24159
  source 1..80: mol_type = other DNA
ccactcatagcagaacgcctagaaaggatagaagcccaaatgcagatggacaggcttattaatggccgtatgaatatatt

SEQ ID NO: 16553 - DNA, 80 bp, synthetic construct
  misc_feature 1..80: note = Synthetic: >Lucheng19-cand-24160-24239
  source 1..80: mol_type = other DNA
acaaaattttgtcaccaattataaactttccatatctgagcttaaatcacagcaaactcttgcacagagtctgattaatg

SEQ ID NO: 16554 - DNA, 80 bp, synthetic construct
  misc_feature 1..80: note = Synthetic: >Lucheng19-cand-24240-24319
  source 1..80: mol_type = other DNA
aatgcgtttacgcacagagcaataggaatggcttctgtggtgatggtctgcacctattctcactgatgcaacgagcaccg

SEQ ID NO: 16555 - DNA, 80 bp, synthetic construct
  misc_feature 1..80: note = Synthetic: >PEDV-cand-3550-3629
  source 1..80: mol_type = other DNA
cataacaactgctgggttacttctaccttggtgcagctacaattgcttggcatcgttgatgaccctgcaatggagctttt

SEQ ID NO: 16556 - DNA, 80 bp, synthetic construct
  misc_feature 1..80: note = Synthetic: >PEDV-cand-3630-3709
  source 1..80: mol_type = other DNA
tagtgctggtagagttggtccaatggttcgcaaatgctatgagtcacaaaaggctatcttgggatctttgggtgatgtgt

SEQ ID NO: 16557 - DNA, 80 bp, synthetic construct
  misc_feature 1..80: note = Synthetic: >PEDV-cand-3720-3799
  source 1..80: mol_type = other DNA
agagtctctgactaaggacctacacacacttaagattacctgttctgtagtctgtggttgtggtactggtgaacgtatct

SEQ ID NO: 16558 - DNA, 80 bp, synthetic construct
  misc_feature 1..80: note = Synthetic: >PEDV-cand-3800-3879
  source 1..80: mol_type = other DNA
atgagggttgtgcttttcgtatgacgccaactttggaaccgttcccatatggtgcttgtgctcagtgtgctcaagttttg

SEQ ID NO: 16559 - DNA, 80 bp, synthetic construct
  misc_feature 1..80: note = Synthetic: >PEDV-cand-3880-3959
  source 1..80: mol_type = other DNA
atgcacacttttaaaagtattgttggcaccggcatcttttgtcgagatactactgctctctccttggattctttggttgt

SEQ ID NO: 16560 - DNA, 80 bp, synthetic construct
  misc_feature 1..80: note = Synthetic: >PEDV-cand-3960-4039
  source 1..80: mol_type = other DNA
aaaacctctttgtgcggctgcttttataggcaaggatagtggtcattatgtcactaacttttatgatgctgctatggcta

SEQ ID NO: 16561 - DNA, 80 bp, synthetic construct
  misc_feature 1..80: note = Synthetic: >PEDV-cand-4040-4119
  source 1..80: mol_type = other DNA
ttgatggttatggtcgtcatcagataaagtatgacacactgaacactatttgtgttaaagacgttaattggacagcacct

SEQ ID NO: 16562 - DNA, 80 bp, synthetic construct
  misc_feature 1..80: note = Synthetic: >PEDV-cand-4120-4199
  source 1..80: mol_type = other DNA
tttgtcccagacgttgagcctgtattggagcctgttgtcaaaccgttctattcttataagaatgttgatttttaccaagg

SEQ ID NO: 16563 - DNA, 80 bp, synthetic construct
  misc_feature 1..80: note = Synthetic: >PEDV-cand-4200-4279
  source 1..80: mol_type = other DNA
agattttagtgaccttgttaaacttccatgtgactttgttgttaatgctgcaaatgagaatttgtctcacggtggcggca

SEQ ID NO: 16564 - DNA, 80 bp, synthetic construct
  misc_feature 1..80: note = Synthetic: >PEDV-cand-4280-4359
  source 1..80: mol_type = other DNA
tagcaaaggccattgatgtttataccaagggcatgttgcagaagtgctcgaatgattacattaaagcacacggtcccatt

SEQ ID NO: 16565 - DNA, 80 bp, synthetic construct
  misc_feature 1..80: note = Synthetic: >PEDV-cand-4360-4439
  source 1..80: mol_type = other DNA
aaagttggacgtggtgtcatgttggaggcattaggtcttaaggtctttaatgttgttggtccacgtaagggtaagcatgc

SEQ ID NO: 16566 - DNA, 80 bp, synthetic construct
  misc_feature 1..80: note = Synthetic: >PEDV-cand-4440-4519
  source 1..80: mol_type = other DNA
acctgagcttcttgttaaggcttataagtccgtttttgctaattcaggtgttgctcttacacctttgattagtgttggaa

SEQ ID NO: 16567 - DNA, 80 bp, synthetic construct
  misc_feature 1..80: note = Synthetic: >PEDV-cand-4520-4599
  source 1..80: mol_type = other DNA
tttttagtgttcctttggaagaatctttatctgcttttcttgcatgtgttggtgatcgccactgtaagtgcttttgttat

SEQ ID NO: 16568 - DNA, 80 bp, synthetic construct
  misc_feature 1..80: note = Synthetic: >PEDV-cand-4600-4679
  source 1..80: mol_type = other DNA
agtgacaaagagcgcgaggcgatcattaattacatggatggcttggtagatgctattttcaaagatgcacttgttgatac

SEQ ID NO: 16569 - DNA, 80 bp, synthetic construct
  misc_feature 1..80: note = Synthetic: >PEDV-cand-4680-4759
  source 1..80: mol_type = other DNA
tactcctgtccaggaagatgttcaacaagtttcacaaaaaccagttttgcctaattttgaacctttcaggattgaaggtg

SEQ ID NO: 16570 - DNA, 80 bp, synthetic construct
  misc_feature 1..80: note = Synthetic: >PEDV-cand-4760-4839
  source 1..80: mol_type = other DNA
ctcatgctttctatgagtgcaaccctgaaggtttgatgtcattaggtgctgacaagctggtgttgtttacaaattccaat

SEQ ID NO: 16571 - DNA, 80 bp, synthetic construct
  misc_feature 1..80: note = Synthetic: >PEDV-cand-8670-8749
  source 1..80: mol_type = other DNA
ttttgctgctgttgcggtgtgtttcttatttacaaagtttaagcgcatgttcggtgatatgtctgttggcgttttcactg

SEQ ID NO: 16572 - DNA, 80 bp, synthetic construct
  misc_feature 1..80: note = Synthetic: >PEDV-cand-8750-8829
  source 1..80: mol_type = other DNA
tcggtgcttgtactttgttgaacaatgtttcctacattgtaacacagaacacacttggcatgttgggctatgcaactttg

SEQ ID NO: 16573 - DNA, 80 bp, synthetic construct
  misc_feature 1..80: note = Synthetic: >PEDV-cand-8830-8909
  source 1..80: mol_type = other DNA
tactttttgtgcactaaaggtgttagatatatgtggatttggcatttgggatttttgatctcatatatacttattgcacc

SEQ ID NO: 16574 - DNA, 80 bp, synthetic construct
  misc_feature 1..80: note = Synthetic: >PEDV-cand-8910-8989
  source 1..80: mol_type = other DNA
atggtgggttttgatggtttatgccttttcagccatttttgagtttatgcctaacctttttaagcttaaggtttcaacac

SEQ ID NO: 16575 - DNA, 80 bp, synthetic construct
  misc_feature 1..80: note = Synthetic: >PEDV-cand-8990-9069
  source 1..80: mol_type = other DNA
aactttttgagggtgacaagttcgtaggctcttttgaaaatgctgcagcaggtacatttgtgcttgatatgcatgcctat

SEQ ID NO: 16576 - DNA, 80 bp, synthetic construct
  misc_feature 1..80: note = Synthetic: >PEDV-cand-9070-9149
  source 1..80: mol_type = other DNA
gagagacttgccaactctatctcaactgaaaaactgcgtcagtatgctagtacttacaataagtacaagtattattcagg

SEQ ID NO: 16577 - DNA, 80 bp, synthetic construct
  misc_feature 1..80: note = Synthetic: >PEDV-cand-9150-9229
  source 1..80: mol_type = other DNA
cagtgcttcagaggctgattacaggcttgcttgttttgcccatttggccaaggctatgatggattatgcttctaatcaca

SEQ ID NO: 16578 - DNA, 80 bp, synthetic construct
  misc_feature 1..80: note = Synthetic: >PEDV-cand-9230-9309
  source 1..80: mol_type = other DNA
acgacacgttatacacaccacccactgtgagttacaattcaactctacaggctggcttgcgtaagatggcacaaccatct

SEQ ID NO: 16579 - DNA, 80 bp, synthetic construct
  misc_feature 1..80: note = Synthetic: >PEDV-cand-9310-9389
  source 1..80: mol_type = other DNA
ggtgttgttgagaagtgcatagttcgtgtttgctatggtaatatggctcttaatggcctatggcttggtgatactgttat

SEQ ID NO: 16580 - DNA, 80 bp, synthetic construct
  misc_feature 1..80: note = Synthetic: >PEDV-cand-9390-9469
  source 1..80: mol_type = other DNA
ctgcccacgccatgttatagcgtctagtactactagcactatagattatgactatgccctttctgttttacgcctccaca

SEQ ID NO: 16581 - DNA, 80 bp, synthetic construct
  misc_feature 1..80: note = Synthetic: >PEDV-cand-9470-9549
  source 1..80: mol_type = other DNA
acttctccatttcatctggtaatgttttcctaggtgttgtgggtgtaaccatgcgaggtgctttgttgcagataaaggtt

SEQ ID NO: 16582 - DNA, 80 bp, synthetic construct
  misc_feature 1..80: note = Synthetic: >PEDV-cand-9550-9629
  source 1..80: mol_type = other DNA
aatcaaaacaatgtccacacgcctaagtacacctatcgcacagttagaccgggtgaatcttttaatatcttggcgtgcta

SEQ ID NO: 16583 - DNA, 80 bp, synthetic construct
  misc_feature 1..80: note = Synthetic: >PEDV-cand-9630-9709
  source 1..80: mol_type = other DNA
tgatggttctgcagctggtgtttacggcgttaacatgcgctctaattacactattagaggctcgttcattaatggcgctt

SEQ ID NO: 16584 - DNA, 80 bp, synthetic construct
  misc_feature 1..80: note = Synthetic: >PEDV-cand-9710-9789
  source 1..80: mol_type = other DNA
gtggttcacctggttataacattaacaatggtaccgttgagttttgctatttacaccagcttgaacttggttcaggctgt

SEQ ID NO: 16585 - DNA, 80 bp, synthetic construct
  misc_feature 1..80: note = Synthetic: >PEDV-cand-9790-9869
  source 1..80: mol_type = other DNA
catgttggtagcgacttagatggtgttatgtatggtggttatgaggaccaacctactttgcaagttgaaggcgctagtag

SEQ ID NO: 16586 - DNA, 80 bp, synthetic construct
  misc_feature 1..80: note = Synthetic: >PEDV-cand-9870-9949
  source 1..80: mol_type = other DNA
tctgtttacagagaatgtgttggcatttctttatgcagcactcattaatggttctacctggtggcttagttcttctagga

SEQ ID NO: 16587 - DNA, 80 bp, synthetic construct
  misc_feature 1..80: note = Synthetic: >PEDV-cand-27850-27929
  source 1..80: mol_type = other DNA
cggtaagccagtggtaatgtcagtgcaagaaggatattaccatagcactgtcatgaggggaacgcagtaccttttcatct

SEQ ID NO: 16588 - DNA, 80 bp, synthetic construct
  misc_feature 1..80: note = Synthetic: >PEDV-cand-27930-28009
  source 1..80: mol_type = other DNA
aaacctttgcacgagtaatcaaagatccgcttgacgagcctatatggaagagcgtgccaggtatttgactcaaggactgc

SEQ ID NO: 16589 - DNA, 80 bp, synthetic construct
  misc_feature 1..80: note = Synthetic: >SARSCoV-cand-80-159
  source 1..80: mol_type = other DNA
gtagctgtcgctcggctgcatgcctagtgcacctacgcagtataaacaataataaattttactgtcgttgacaagaaacg

SEQ ID NO: 16590 - DNA, 80 bp, synthetic construct
  misc_feature 1..80: note = Synthetic: >SARSCoV-cand-550-629
  source 1..80: mol_type = other DNA
cggtcgtagcggtataacactgggagtactcgtgccacatgtgggcgaaaccccaattgcataccgcaatgttcttcttc

SEQ ID NO: 16591 - DNA, 80 bp, synthetic construct
  misc_feature 1..80: note = Synthetic: >SARSCoV-cand-630-709
  source 1..80: mol_type = other DNA
gtaagaacggtaataagggagccggtggtcatagctatggcatcgatctaaagtcttatgacttaggtgacgagcttggc

SEQ ID NO: 16592 - DNA, 80 bp, synthetic construct
  misc_feature 1..80: note = Synthetic: >SARSCoV-cand-860-939
  source 1..80: mol_type = other DNA
atcaaagattttctcgcacgcgcgggcaagtcaatgtgcactctttccgaacaacttgattacatcgagtcgaagagagg

SEQ ID NO: 16593 - DNA, 80 bp, synthetic construct
  misc_feature 1..80: note = Synthetic: >SARSCoV-cand-940-1019
  source 1..80: mol_type = other DNA
tgtctactgctgccgtgaccatgagcatgaaattgcctggttcactgagcgctctgataagagctacgagcaccagacac

SEQ ID NO: 16594 - DNA, 80 bp, synthetic construct
  misc_feature 1..80: note = Synthetic: >SARSCoV-cand-1020-1099
  source 1..80: mol_type = other DNA
ccttcgaaattaagagtgccaagaaatttgacactttcaaaggggaatgcccaaagtttgtgtttcctcttaactcaaaa

SEQ ID NO: 16595 - DNA, 80 bp, synthetic construct
  misc_feature 1..80: note = Synthetic: >Sparrow-cand-2590-2669
  source 1..80: mol_type = other DNA
atggaaggtgaagatgatagtggtgatgaaatttgcattgaggatgacgattacgattgtcctcaagttgaagaagacac

SEQ ID NO: 16596 - DNA, 80 bp, synthetic construct
  misc_feature 1..80: note = Synthetic: >Sparrow-cand-2670-2749
  source 1..80: mol_type = other DNA
tgatggagcaattccccaacaatgggatctaccagatgtcgatacattcttgctcaaactcaaggaacggaacaccagaa

SEQ ID NO: 16597 - DNA, 80 bp, synthetic construct
  misc_feature 1..80: note = Synthetic: >Sparrow-cand-2750-2829
  source 1..80: mol_type = other DNA
gcgacgaagtactaagcgttgacatacacccgaagcctaaggcagaggtggccgtcctcgcgccggaaaagaagcctgac

SEQ ID NO: 16598 - DNA, 80 bp, synthetic construct
  misc_feature 1..80: note = Synthetic: >Sparrow-cand-2830-2909
  source 1..80: mol_type = other DNA
ggtgaccaagtacagagttctgaggacccttccccagcttcggttgaggatgcggaactgtttcccgattcagcccctga

SEQ ID NO: 16599 - DNA, 80 bp, synthetic construct
  misc_feature 1..80: note = Synthetic: >Sparrow-cand-2910-2989
  source 1..80: mol_type = other DNA
ggctgtaactcgaactcaatctgagagatcggaggcggctgagtgcgaccaagaaactactacttcgtctaccacccaag

SEQ ID NO: 16600 - DNA, 80 bp, synthetic construct
  misc_feature 1..80: note = Synthetic: >Sparrow-cand-2990-3069
  source 1..80: mol_type = other DNA
tagatgaggtcgaagaacccaaattaccaactgaacctgagttgcgctcctatgacggagattgcgactctgacgatgaa

SEQ ID NO: 16601 - DNA, 80 bp, synthetic construct
  misc_feature 1..80: note = Synthetic: >Sparrow-cand-3070-3149
  source 1..80: mol_type = other DNA
atcataatacctgtagtaccagatacgcctgaggattgtaagcctctgtctgtgactatcagggaatactttaatgccca

SEQ ID NO: 16602 - DNA, 80 bp, synthetic construct
  misc_feature 1..80: note = Synthetic: >Sparrow-cand-3150-3229
  source 1..80: mol_type = other DNA
gaaattggacactatacctgaaggttctactgagtctgttgctacaaaagaatcctcggatgaggaaccttttgttgatg

SEQ ID NO: 16603 - DNA, 80 bp, synthetic construct
  misc_feature 1..80: note = Synthetic: >Sparrow-cand-3230-3309
  source 1..80: mol_type = other DNA
cagagcccgcagaaccacaacaagatgctgtttatgatgatcaagaaaccatcataactgacagcactgaaccagacgag

SEQ ID NO: 16604 - DNA, 80 bp, synthetic construct
  misc_feature 1..80: note = Synthetic: >Sparrow-cand-3310-3389
  source 1..80: mol_type = other DNA
gagcctgaagttactttggctactatcgtcaacaccccactaactattgacaataacttgccacctgaagccattaaaca

SEQ ID NO: 16605 - DNA, 80 bp, synthetic construct
  misc_feature 1..80: note = Synthetic: >Sparrow-cand-3390-3469
  source 1..80: mol_type = other DNA
accgagcccgacaaaagttgagctagttgttggcgagctgtcaagtattaaatatgacaattctgtcctagtaaaccctg

SEQ ID NO: 16606 - DNA, 80 bp, synthetic construct
  misc_feature 1..80: note = Synthetic: >Sparrow-cand-3470-3549
  source 1..80: mol_type = other DNA
ctaacccgcaattaaccaatggtggcggtgctgcccttgctattgcgaaattagctggacctaaatatcaagagtactgt

SEQ ID NO: 16607 - DNA, 80 bp, synthetic construct
  misc_feature 1..80: note = Synthetic: >Sparrow-cand-3550-3629
  source 1..80: mol_type = other DNA
aatagtgtggctcctattagtggaaccctcactactgactcttttgatgcaaagaaacttggcgtggcctgcattttaca

SEQ ID NO: 16608 - DNA, 80 bp, synthetic construct
  misc_feature 1..80: note = Synthetic: >Sparrow-cand-3630-3709
  source 1..80: mol_type = other DNA
tgttgtaccacccaagggttctgaccctaatgttcaggagctattgtaccaagcatacaagagcatccttaacgaaccag

SEQ ID NO: 16609 - DNA, 80 bp, synthetic construct
  misc_feature 1..80: note = Synthetic: >Sparrow-cand-3710-3789
  source 1..80: mol_type = other DNA
cccactatgtaatacccatacttggagctggtatttttggttgcaatccggtacattcactggatgcattcaagaaagcc

SEQ ID NO: 16610 - DNA, 80 bp, synthetic construct
  misc_feature 1..80: note = Synthetic: >Sparrow-cand-3790-3869
  source 1..80: mol_type = other DNA
tgtcctagtgacatcggtcgtgttaccctagtcactatgaacaaaaaccacttgcaggtgtgggatgcccttaacaggac

SEQ ID NO: 16611 - DNA, 80 bp, synthetic construct
  misc_feature 1..80: note = Synthetic: >BtRf_AlphaCoV-cand-13190-13269
  source 1..80: mol_type = other DNA
tctctgcagaaaagtttttgtagatggtgtgccacttattgctaccgctggttaccattttaagcagttaggtttagttt

SEQ ID NO: 16612 - DNA, 80 bp, synthetic construct
  misc_feature 1..80: note = Synthetic: >HKU2R-cand-13220-13299
  source 1..80: mol_type = other DNA
tcctctctgcagaaaagtttttgtagatggtgtgccacttattgccaccgccggttaccattttaagcagttgggtttag

SEQ ID NO: 16613 - DNA, 80 bp, synthetic construct
  misc_feature 1..80: note = Synthetic: >BtSk_AlphaCoV-cand-11510-11589
  source 1..80: mol_type = other DNA
gttgttagtgctatgcactctttgctctttggtatgttaaggcgattggatatgtcatctgttgacaccattcttagttt

SEQ ID NO: 16614 - DNA, 80 bp, synthetic construct
  misc_feature 1..80: note = Synthetic: >Sb512-cand-11550-11629
  source 1..80: mol_type = other DNA
taaagttgttagtgctatgcactctttgctctttggtatgttaaggcgattggatatgtcatctgttgacaccattctta

SEQ ID NO: 16615 - DNA, 80 bp, synthetic construct
  misc_feature 1..80: note = Synthetic: >Sk512R-cand-11540-11619
  source 1..80: mol_type = other DNA
gtctaaagttgttagtgctatgcactctttgctctttggtatgttaaggcgattggacatgtcatctgttgacaccattc

SEQ ID NO: 16616 - DNA, 80 bp, synthetic construct
  misc_feature 1..80: note = Synthetic: >Sk512R-cand-17040-17119
  source 1..80: mol_type = other DNA
aaacttctgatactgctcatgctagtaacgttaataggtttaacgttgctataactagagctaagaagggtatcttgtgt

SEQ ID NO: 16617 - DNA, 80 bp, synthetic construct
  misc_feature 1..80: note = Synthetic: >BtSk_AlphaCoV-cand-17010-17089
  source 1..80: mol_type = other DNA
tactgctcatgctagtaacgttaataggtttaacgttgctataactagggctaagaagggtatcttgtgtattatgtgtg

SEQ ID NO: 16618 - DNA, 80 bp, synthetic construct
  misc_feature 1..80: note = Synthetic: >Sb512-cand-17060-17139
  source 1..80: mol_type = other DNA
tgctcatgctagtaacgttaataggtttaacgttgctataactagagctaagaagggtatcctgtgtattatgtgtgatc

SEQ ID NO: 16619 - DNA, 80 bp, synthetic construct
  misc_feature 1..80: note = Synthetic: >BtSk_AlphaCoV-cand-15730-15809
  source 1..80: mol_type = other DNA
gttaaagattctttgcgtttatttgctgctgaaaccattaaggctaaggaagagagtgttaagtcttcttatgcttgtgc

SEQ ID NO: 16620 - DNA, 80 bp, synthetic construct
  misc_feature 1..80: note = Synthetic: >Sk512R-cand-15760-15839
  source 1..80: mol_type = other DNA
agcaaatgacgttaaagattctttgcgtttatttgctgctgaaaccattaaggctaaggaagagagtgttaagtcttctt

SEQ ID NO: 16621 - DNA, 80 bp, synthetic construct
  misc_feature 1..80: note = Synthetic: >Sb512-cand-15780-15859
  source 1..80: mol_type = other DNA
aaagattctttgcgtttatttgctgctgaaaccattaaggctaaggaagagagtgttaagtcttcttacgcttgtgccac

SEQ ID NO: 16622 - DNA, 80 bp, synthetic construct
  misc_feature 1..80: note = Synthetic: >MbCoV1-cand-6890-6969
  source 1..80: mol_type = other DNA
ttacttttgtaaagatcatgtcgaaggttacagtaattccacttttgtgaaagatgagtactgtgcttccactatgtgta

SEQ ID NO: 16623 - DNA, 80 bp, synthetic construct
  misc_feature 1..80: note = Synthetic: >MinkCoV1-cand-18720-18799
  source 1..80: mol_type = other DNA
aaagatgatgttgttgtatgctatgataatagcatagttggttcttatgaacgttttacaaccagtaaagatggtgttct

SEQ ID NO: 16624 - DNA, 80 bp, synthetic construct
  misc_feature 1..80: note = Synthetic: >Alpha2-cand-18680-18759
  source 1..80: mol_type = other DNA
tctcaaagatgatgttgttgtatgctatgataatagcatagttggttcttatgaacgctttacaaccagtaaagatggtg

SEQ ID NO: 16625 - DNA, 80 bp, synthetic construct
  misc_feature 1..80: note = Synthetic: >BtRl_BetaCoV-cand-11880-11959
  source 1..80: mol_type = other DNA
aaagatggtttctcttttgtctgttttgctatccatgcagggtgctgtagacattaataagttgtgcgaggaaatgctcg

SEQ ID NO: 16626 - DNA, 80 bp, synthetic construct
  misc_feature 1..80: note = Synthetic: >WIV16-cand-11910-11989
  source 1..80: mol_type = other DNA
cattcgaaaagatggtttctcttttgtctgtcttgctatccatgcagggtgctgtagacattaataagttgtgcgaggaa

SEQ ID NO: 16627 - DNA, 80 bp, synthetic construct
  misc_feature 1..80: note = Synthetic: >MsbCoV1-cand-27480-27559
  source 1..80: mol_type = other DNA
aaagcagatcttctagtggcaaatctactccagctcattcaaaatctccagctagaccatccaataagaaacaacttgac

SEQ ID NO: 16628 - DNA, 80 bp, synthetic construct
  misc_feature 1..80: note = Synthetic: >MbCoV1-cand-27480-27559
  source 1..80: mol_type = other DNA
attcaacaaagcagatcttctagtggcaaatctactccagctcgttcaaaatctccagctagaccatccaataagaaaca

SEQ ID NO: 16629 - DNA, 80 bp, synthetic construct
  misc_feature 1..80: note = Synthetic: >HKU4R-cand-1240-1319
  source 1..80: mol_type = other DNA
ttacatttaccactctgcttatgttgattgtaatgcgtgtggtaggggtacgtggtgtacggggaatgctatacagggtt

SEQ ID NO: 16630 - DNA, 80 bp, synthetic construct
  misc_feature 1..80: note = Synthetic: >MsbCoV1-cand-17600-17679
  source 1..80: mol_type = other DNA
tttttaaggattgtagtcgtgttgaagaaccactaccaccagcttatgctcctacatatgtttcattgtcagatcgcttt

SEQ ID NO: 16631 - DNA, 80 bp, synthetic construct
  misc_feature 1..80: note = Synthetic: >MbCoV1-cand-17620-17699
  source 1..80: mol_type = other DNA
ttgtagtcgtgttgaagaaccactaccaccagcttatgctcctacatatgtttcattgtcagatcgttttaaaacatctg

SEQ ID NO: 16632 - DNA, 80 bp, synthetic construct
  misc_feature 1..80: note = Synthetic: >SEAC-cand-17400-17479
  source 1..80: mol_type = other DNA
aaagctagagctccaccgggtgaacaattcacacacctagtacctttgatgcgtaaagggcagccatggtacgttgtacg

SEQ ID NO: 16633 - DNA, 80 bp, synthetic construct
  misc_feature 1..80: note = Synthetic: >BtRf_AlphaCoV-cand-17210-17289
  source 1..80: mol_type = other DNA
agctccaccgggtgaacaattcacacacctagtacctttgatgcgtaaagggcagccatggtatgttgtacgacgtagaa

SEQ ID NO: 16634 - DNA, 80 bp, synthetic construct
  misc_feature 1..80: note = Synthetic: >MbCoV1-cand-23820-23899
  source 1..80: mol_type = other DNA
atggctaatactattgctgaggctggttgtgtccagtattataatggcattatggtgttgcctggtgtagttgatccttc

SEQ ID NO: 16635 - DNA, 80 bp, synthetic construct
  misc_feature 1..80: note = Synthetic: >SEAC-cand-17720-17799
  source 1..80: mol_type = other DNA
acagcaatggggctatacagggtctcttagcagtaaccatcatgaagtttgtaatgtgcaccgtaatgagcatgttgctt

SEQ ID NO: 16636 - DNA, 80 bp, synthetic construct
  misc_feature 1..80: note = Synthetic: >BtRf_AlphaCoV-cand-17530-17609
  source 1..80: mol_type = other DNA
ggggctatacagggtctcttagcagtaaccatcatgaagtttgtaatgtgcaccgtaatgagcatgttgcttcaggtgac

SEQ ID NO: 16637 - DNA, 80 bp, synthetic construct
  misc_feature 1..80: note = Synthetic: >HKU24-cand-490-569
  source 1..80: mol_type = other DNA
aagcaagccttgttgtcccgcgaggcagtttttgtgcgaccaccccagcacatgactcttgagtcatgttatgcaggagg

SEQ ID NO: 16638 - DNA, 80 bp, synthetic construct
  misc_feature 1..80: note = Synthetic: >BtRf_AlphaCoV-cand-14920-14999
  source 1..80: mol_type = other DNA
tgacattattggatgatgttcagagtaagttctgggatgaggctttttatgctggtatgtatgaaaagtctactgtgctt

SEQ ID NO: 16639 - DNA, 80 bp, synthetic construct
  misc_feature 1..80: note = Synthetic: >HKU2R-cand-14960-15039
  source 1..80: mol_type = other DNA
acttgatgatgtacagagtaaattctgggacgaggctttttatgctggtatgtatgaaaagtctactgtgcttcaggccg

SEQ ID NO: 16640 - DNA, 80 bp, synthetic construct
  misc_feature 1..80: note = Synthetic: >FelineAlpha1-cand-6010-6089
  source 1..80: mol_type = other DNA
aagcatatagtaattctagttttgtaaagtcagaagtctgtggtagctctattttgtgtaaggcatgtctggcgtcttat

SEQ ID NO: 16641 - DNA, 80 bp, synthetic construct
  misc_feature 1..80: note = Synthetic: >HKU5R-cand-8160-8239
  source 1..80: mol_type = other DNA
aagccaatgttgcttgtagattcgaacatggtcaccactgttggcgacagtcgagagattgccagcaaaatgcttgattc

SEQ ID NO: 16642 - DNA, 80 bp, synthetic construct
  misc_feature 1..80: note = Synthetic: >MbCoV1-cand-19700-19779
  source 1..80: mol_type = other DNA
ttcacacaaggtcgcaatgttagcatctttgaaccacgtagtgagatggagtctgatttcttaaatctagacatgggctt

SEQ ID NO: 16643 - DNA, 80 bp, synthetic construct
  misc_feature 1..80: note = Synthetic: >HKU4R-cand-3240-3319
  source 1..80: mol_type = other DNA
tggatgacattctagtagctgaaattgagttggaagaagacccaccactggaaaccgccttggaaagtgtggaagctgaa

SEQ ID NO: 16644 - DNA, 80 bp, synthetic construct
  misc_feature 1..80: note = Synthetic: >HKU10R-cand-11350-11429
  source 1..80: mol_type = other DNA
gatgctattgctaatgattctgctcctcagttggttaaacaattgaagacagctatgaatatagccaagtctgagtttga

SEQ ID NO: 16645 - DNA, 80 bp, synthetic construct
  misc_feature 1..80: note = Synthetic: >WIV16-cand-24730-24809
  source 1..80: mol_type = other DNA
acttcgtggtttattacacagaggaacttcttttctccacaaataattactacagacaatacatttgtctccggaagttg

SEQ ID NO: 16646 - DNA, 80 bp, synthetic construct
  misc_feature 1..80: note = Synthetic: >HKU10R-cand-14710-14789
  source 1..80: mol_type = other DNA
ctatcgacagcaatgtttgtaataatgttagtgtcaaaactctacaaagagagttgtatgacaactgctacagatcatca

SEQ ID NO: 16647 - DNA, 80 bp, synthetic construct
  misc_feature 1..80: note = Synthetic: >HKU17-cand-10080-10159
  source 1..80: mol_type = other DNA
acttgcttgagaacaaagttgttgttcaggcagttgctgatatcaacattaatctggattcttatagaatttataaggag

SEQ ID NO: 16648 - DNA, 80 bp, synthetic construct
  misc_feature 1..80: note = Synthetic: >HKU24-cand-2820-2899
  source 1..80: mol_type = other DNA
tgcttgtaacagttttgaggtggatggtagtgttgatgcagatgagcttgctgctgtgattgttgatacaattcaggaca

SEQ ID NO: 16649 - DNA, 80 bp, synthetic construct
  misc_feature 1..80: note = Synthetic: >Sb512-cand-7240-7319
  source 1..80: mol_type = other DNA
tgtaaagatgtgcttaaaaactgtaatattttaactgattttgttgtgtttaacaatagtggttctaatgtgacacaagt

SEQ ID NO: 16650 - DNA, 80 bp, synthetic construct
  misc_feature 1..80: note = Synthetic: >Sk512R-cand-7240-7319
  source 1..80: mol_type = other DNA
atgtgcttaaaaactgtaatattttaactgactttgttgtgtttaacaatagtggttctaatgtgacacaagttaaaaat

SEQ ID NO: 16651 - DNA, 80 bp, synthetic construct
  misc_feature 1..80: note = Synthetic: >HKU5R-cand-7120-7199
  source 1..80: mol_type = other DNA
acttgttcttgtttcatcaagttctaacaagtgacgtcatgttggatggtgccgaaggcatgttggctacttatagggag

SEQ ID NO: 16652 - DNA, 80 bp, synthetic construct
  misc_feature 1..80: note = Synthetic: >HKU5R-cand-29530-29609
  source 1..80: mol_type = other DNA
ggaactctttcagttcttttggacttacagaaaaggcttgctgatttggaagctggtaagggtaataagcaacctaaagt

SEQ ID NO: 16653 - DNA, 80 bp, synthetic construct
  misc_feature 1..80: note = Synthetic: >SARSRC-cand-27060-27139
  source 1..80: mol_type = other DNA
ttatgaggactttcaggattgccatttggaatcttgatgtactaataagttcaatagtgagacaattatttaagcctcta

SEQ ID NO: 16654 - DNA, 80 bp, synthetic construct
  misc_feature 1..80: note = Synthetic: >HKU5R-cand-8080-8159
  source 1..80: mol_type = other DNA
ttctaatctatgactcgagtgatcgtggccaggaaaatttagccagatcagcttgcgtttattattcccaggttctctcc

SEQ ID NO: 16655 - DNA, 80 bp, synthetic construct
  misc_feature 1..80: note = Synthetic: >BtSk_AlphaCoV-cand-90-169
  source 1..80: mol_type = other DNA
tgcttagtagctagtacaagtgtcgtgctgctccagggttcttggtgtgggttccgtctcacacttcacaccctcaaagt

SEQ ID NO: 16656 - DNA, 80 bp, synthetic construct
  misc_feature 1..80: note = Synthetic: >WIV16-cand-23360-23439
  source 1..80: mol_type = other DNA
gaaataatgtatttcaaacccaggcaggctgtcttataggagctgagcatgtcgacacttcttatgagtgcgacattcct

SEQ ID NO: 16657 - DNA, 80 bp, synthetic construct
  misc_feature 1..80: note = Synthetic: >HKU4R-cand-6440-6519
  source 1..80: mol_type = other DNA
ggtgttactgttgtagacacattaggtttgactgaactacgtgctttgtacgtggatattaatactagatatattgtcct

SEQ ID NO: 16658 - DNA, 80 bp, synthetic construct
  misc_feature 1..80: note = Synthetic: >HKU8R-cand-17940-18019
  source 1..80: mol_type = other DNA
cttggactgtcattcgcaagcgcatagtacagatgtgttgtgattatgtcagtccttcatctgacattctcatttttgtg

SEQ ID NO: 16659 - DNA, 80 bp, synthetic construct
  misc_feature 1..80: note = Synthetic: >AcCoV_JC34-cand-13010-13089
  source 1..80: mol_type = other DNA
ggtatgacaaattgtctcgcacaagagtgctacatgaatagtgacatttttggcaaagattttaaacgctatgacctcct

SEQ ID NO: 16660 - DNA, 80 bp, synthetic construct
  misc_feature 1..80: note = Synthetic: >HKU2R-cand-18370-18449
  source 1..80: mol_type = other DNA
ctaatttacaaggccttgagaacattgcatacaatgttgtcaagaagggctcttttgttggtgaaccaggtgagttgcct

SEQ ID NO: 16661 - DNA, 80 bp, synthetic construct
  misc_feature 1..80: note = Synthetic: >BtRf_AlphaCoV-cand-18330-18409
  source 1..80: mol_type = other DNA
gttgacactaatttacagggccttgagaacattgcattcaatgtcgtcaagaagggctcttttgttggtgaaccaggtga

SEQ ID NO: 16662 - DNA, 80 bp, synthetic construct
  misc_feature 1..80: note = Synthetic: >MbCoV1-cand-4090-4169
  source 1..80: mol_type = other DNA
tgtttatcacttgtgatgccacttgtggttgtggtagcagtaattatgaacttactggttctgtttttagatttatgcct

SEQ ID NO: 16663 - DNA, 80 bp, synthetic construct
  misc_feature 1..80: note = Synthetic: >MsbCoV1-cand-4080-4159
  source 1..80: mol_type = other DNA
ttatcacttgtgatgccacttgtggttgtggtagcagtagttatgaacttagtggttctgtttttagatttatgcctacc

SEQ ID NO: 16664 - DNA, 80 bp, synthetic construct
  misc_feature 1..80: note = Synthetic: >HKU5R-cand-26970-27049
  source 1..80: mol_type = other DNA
cattagacttcgtccaacaatcatatgttggcagcaagttctttattaaacattctcacaccactgaatatgctatgcct

SEQ ID NO: 16665 - DNA, 80 bp, synthetic construct
  misc_feature 1..80: note = Synthetic: >Sk512R-cand-4130-4209
  source 1..80: mol_type = other DNA
ggatgttgattgggaggtgcctaatggttcttgtgatgtcaaaccatttttgacttacaagaacattgagttttaccaag

SEQ ID NO: 16666 - DNA, 80 bp, synthetic construct
  misc_feature 1..80: note = Synthetic: >MsbCoV1-cand-24520-24599
  source 1..80: mol_type = other DNA
tgtacccactgcatttattgaagtctctgcctttgctggagtttgtgttgatggcagagcattggttcttagaggtcgtg

SEQ ID NO: 16667 - DNA, 80 bp, synthetic construct
  misc_feature 1..80: note = Synthetic: >BatCoV1A-cand-24700-24779
  source 1..80: mol_type = other DNA
cccactgcatttattgaagtctctgcttttgctggagtttgcgtcgatggcagagcattggttcttagaggtcgtgatga

SEQ ID NO: 16668 - DNA, 80 bp, synthetic construct
  misc_feature 1..80: note = Synthetic: >Sb512-cand-19880-19959
  source 1..80: mol_type = other DNA
catgtttaacgtagtcaaatacacacagctttgtcagtatttgaacagcactacaatgtgtgttccacaccacatgcgtg

SEQ ID NO: 16669 - DNA, 80 bp, synthetic construct
  misc_feature 1..80: note = Synthetic: >BtSk_AlphaCoV-cand-19830-19909
  source 1..80: mol_type = other DNA
tatcatgtttaacgtagtcaaatacacacagctttgtcagtatttgaacagcactacaatgtgtgttccacaccatatgc

SEQ ID NO: 16670 - DNA, 80 bp, synthetic construct
  misc_feature 1..80: note = Synthetic: >HKU10R-cand-14390-14469
  source 1..80: mol_type = other DNA
gaacacacttattaatggtgtcgaaaacccttgtcttatgggatgggattaccctaagtgtgacagagcattgcctaaca

SEQ ID NO: 16671 - DNA, 80 bp, synthetic construct
  misc_feature 1..80: note = Synthetic: >HghCoV1-cand-280-359
  source 1..80: mol_type = other DNA
gtatagagcagcgctcaacaatgaaaaacgtcatgaccatgttgccctaactgtgccatgctgtggtacagaggctaagg

SEQ ID NO: 16672 - DNA, 80 bp, synthetic construct
  misc_feature 1..80: note = Synthetic: >BtSk_AlphaCoV-cand-13890-13969
  source 1..80: mol_type = other DNA
gaagggtgatgcagctgttaaagattttgattattacagatacaaccgtaccactgttttggatatttgccaagcacgtg

SEQ ID NO: 16673 - DNA, 80 bp, synthetic construct
  misc_feature 1..80: note = Synthetic: >Sk512R-cand-13920-13999
  source 1..80: mol_type = other DNA
ttttcgctcagaagggtgacgcagctgttagagatttcgattattatagatacaaccgtaccactgttttggatatttgc

SEQ ID NO: 16674 - DNA, 80 bp, synthetic construct
  misc_feature 1..80: note = Synthetic: >AlphaMink-cand-27060-27139
  source 1..80: mol_type = other DNA
tgttcctaagaatgaaaacaagcactcatggaagaaaacgcctggcaaaggagacgttgaaactatgtttggaaaacgtg

SEQ ID NO: 16675 - DNA, 80 bp, synthetic construct
  misc_feature 1..80: note = Synthetic: >Alpha2-cand-27050-27129
  source 1..80: mol_type = other DNA
ctgttcctaagaatgaaaacaagcactcatggaagaaaacgcctggcaaaggagatgttgaaaccatgtttggaaaacgc

SEQ ID NO: 16676 - DNA, 80 bp, synthetic construct
  misc_feature 1..80: note = Synthetic: >SEAC-cand-3810-3889
  source 1..80: mol_type = other DNA
tggtattgttggctctgcaatattttcacagactcttaagccattggatttcaatgacctgatctgtgatgttgctagtg

SEQ ID NO: 16677 - DNA, 80 bp, synthetic construct
  misc_feature 1..80: note = Synthetic: >HKU2R-cand-3650-3729
  source 1..80: mol_type = other DNA
ttgttggctctgcaatattttcacagactcttaagccattgaattttgatgacttaatctgtgatgttgctagtgctagc

SEQ ID NO: 16678 - DNA, 80 bp, synthetic construct
  misc_feature 1..80: note = Synthetic: >HKU10R-cand-26300-26379
  source 1..80: mol_type = other DNA
tacatttagtctaaactaaacaaaaatggcctcaggtggcaacaatgttagctttgctaacaagcctagaggtcggagtg

SEQ ID NO: 16679 - DNA, 80 bp, synthetic construct
  misc_feature 1..80: note = Synthetic: >HKU8R-cand-13050-13129
  source 1..80: mol_type = other DNA
ggtttaaaaacgccgacaagcatgatgcattctatgttgttaaacgttgtactaagagtgttatggaacacgagcaatcc

SEQ ID NO: 16680 - DNA, 80 bp, synthetic construct
  misc_feature 1..80: note = Synthetic: >HKU5R-cand-19120-19199
  source 1..80: mol_type = other DNA
tttcattgaacgtgttgagtgggatatcacgtatccttacatctcacatgaaaaacgtcttaattcctgttgtagggcag

SEQ ID NO: 16681 - DNA, 80 bp, synthetic construct
  misc_feature 1..80: note = Synthetic: >HKU8R-cand-20020-20099
  source 1..80: mol_type = other DNA
cttttatcctcaattgcaatcggctgagtggaagtgcggttattctatgccttcgttgtacaagatccaacgcatgtgcc

SEQ ID NO: 16682 - DNA, 80 bp, synthetic construct
  misc_feature 1..80: note = Synthetic: >HKU4R-cand-6600-6679
  source 1..80: mol_type = other DNA
ctgttacaagaagagcgcgtgttcttcttggtgcatcatcactctttgcaagttttgcaaaaattacagttactgcaacg

SEQ ID NO: 16683 - DNA, 80 bp, synthetic construct
  misc_feature 1..80: note = Synthetic: >Alpha2-cand-25850-25929
  source 1..80: mol_type = other DNA
tggccactggttttagcactcacgatttttaatgcctattctgaatatataaattccaggtatgtaatgtttggctttag

SEQ ID NO: 16684 - DNA, 80 bp, synthetic construct
  misc_feature 1..80: note = Synthetic: >AlphaMink-cand-25860-25939
  source 1..80: mol_type = other DNA
ggccactggttttagcactcacgatttttaatgcctattctgaatatatgaattccaggtatgtaatgtttggctttagc

SEQ ID NO: 16685 - DNA, 80 bp, synthetic construct
  misc_feature 1..80: note = Synthetic: >AcCoV_JC34-cand-24300-24379
  source 1..80: mol_type = other DNA
gttgtagaactagctaacggtgagtgcatctatatttttaccaaagaacctgcagtcagtgtttataactttagttttca

SEQ ID NO: 16686 - DNA, 80 bp, synthetic construct
  misc_feature 1..80: note = Synthetic: >AlphaMink-cand-26900-26979
  source 1..80: mol_type = other DNA
ctaagtctaacacaaggtctaatgataaccaatcttcaagtcaagacatagccactgctgttgctgctgctctagctcaa

SEQ ID NO: 16687 - DNA, 80 bp, synthetic construct
  misc_feature 1..80: note = Synthetic: >Alpha2-cand-26890-26969
  source 1..80: mol_type = other DNA
tctaagtctaacacaagatctaatgacaaccaatcttcaagtcaagatatagccactgctgttgctgctgctctagctca

SEQ ID NO: 16688 - DNA, 80 bp, synthetic construct
  misc_feature 1..80: note = Synthetic: >MN531554-cand-1360-1439
  source 1..80: mol_type = other DNA
aagattgttgagaacatacctaatgcaccaagaggtactaagggttttgaagttgttggcaatgcgaaaggcactcaagt

SEQ ID NO: 16689 - DNA, 80 bp, synthetic construct
  misc_feature 1..80: note = Synthetic: >MN517816-cand-20170-20249
  source 1..80: mol_type = other DNA
aagcatttatgctgggtattaattatttgggtgaaagtggaaaagtgaaagttagtggaaaaacactgcacgcaaactat

SEQ ID NO: 16690 - DNA, 80 bp, synthetic construct
  misc_feature 1..80: note = Synthetic: >MN531555-cand-16890-16969
  source 1..80: mol_type = other DNA
aagcgcggtatacttgttgtcatgcgtcagcgtgatgagttgtattttgctcttaaatttacagagcttgatgctgaagc

SEQ ID NO: 16691 - DNA, 80 bp, synthetic construct
  misc_feature 1..80: note = Synthetic: >MN128086-cand-11930-12009
  source 1..80: mol_type = other DNA
aaggacatgaaacagaggaagtatatgccgttggcattctttctctatgttcttttgcagtagacccagctgatacatat

SEQ ID NO: 16692 - DNA, 80 bp, synthetic construct
  misc_feature 1..80: note = Synthetic: >AJ311317-cand-10970-11049
  source 1..80: mol_type = other DNA
ctttatgaaaaggttttagttgattctaaaaatggtggtgttacacagcaagagcttgctgcatatcgtaaagctgccaa

SEQ ID NO: 16693 - DNA, 80 bp, synthetic construct
  misc_feature 1..80: note = Synthetic: >MN531555-cand-20650-20729
  source 1..80: mol_type = other DNA
tcttctgtagctatgaccgctccgaataatggtatgacttggtctacagcacaattttgtactgcacactgcaatttttc

SEQ ID NO: 16694 - DNA, 80 bp, synthetic construct
  misc_feature 1..80: note = Synthetic: >MN690609-cand-2580-2659
  source 1..80: mol_type = other DNA
gaccttgtgtgtaaacaggttgttagtagtgtagctatggtgcagagcgaagtggtaggcgaaggcagttccgtacatac

SEQ ID NO: 16695 - DNA, 80 bp, synthetic construct
  misc_feature 1..80: note = Synthetic: >KT253270-cand-240-319
  source 1..80: mol_type = other DNA
tgtgtggaagcaaagttctgtctttgtggaaaccagtaactgttcctaatggcctgcaaccgtatgacacttgccgtagc

SEQ ID NO: 16696 - DNA, 80 bp, synthetic construct
  misc_feature 1..80: note = Synthetic: >SBB-024-cand-19590-19669
  source 1..80: mol_type = other DNA
catgtgcctagagccatgtaacctctacaattatggtactggtgttaagctaccagatggcatcatgttcaatgtcgtta

SEQ ID NO: 16697 - DNA, 80 bp, synthetic construct
  misc_feature 1..80: note = Synthetic: >SBB-120-cand-20090-20169
  source 1..80: mol_type = other DNA
aatttgaattttggactttattttgtactagtgtcaacacatcatcttcagaagctttccttattggtgttaattggctc

SEQ ID NO: 16698 - DNA, 80 bp, synthetic construct
  misc_feature 1..80: note = Synthetic: >SBB-010-cand-20080-20159
  source 1..80: mol_type = other DNA
ctcatacagaaatttgaattttggactttattttgtactagtgtaaatacatcatcctcagaagcttttctgattggtgt

SEQ ID NO: 16699 - DNA, 80 bp, synthetic construct
  misc_feature 1..80: note = Synthetic: >SBB-130-cand-20080-20159
  source 1..80: mol_type = other DNA
atacagaaatttgaattttggactttgttctgtactagtgtaaacacatcatcttcagaagcttttctgattggtgttaa

SEQ ID NO: 16700 - DNA, 80 bp, synthetic construct
  misc_feature 1..80: note = Synthetic: >SBB-053-cand-20070-20149
  source 1..80: mol_type = other DNA
gttgtatgagctcatacagaaatttgaattttggactttattttgtactagtgtaaatacatcatcctcagaagcttttc

SEQ ID NO: 16701 - DNA, 80 bp, synthetic construct
  misc_feature 1..80: note = Synthetic: >SBB-024-cand-3900-3979
  source 1..80: mol_type = other DNA
acaaaaccaatgtttacatgatgaacatttgtgttgatggcaatggacaaggtcctattacatggaatactgtcaacact

SEQ ID NO: 16702 - DNA, 80 bp, synthetic construct
  misc_feature 1..80: note = Synthetic: >SBB-122-cand-3890-3969
  source 1..80: mol_type = other DNA
ggttgtcattacaaaactaatgtttatacgatgaacatttgtgttgatggcaatggacaaggtcctattacatggaatac

SEQ ID NO: 16703 - DNA, 80 bp, synthetic construct
  misc_feature 1..80: note = Synthetic: >SBB-041-cand-3880-3959
  source 1..80: mol_type = other DNA
tgtgtttatgggtagtcattacaagaccaatgtttacatgatgaacatttgtgttgatggcaatggacaaggtcctatta

SEQ ID NO: 16704 - DNA, 80 bp, synthetic construct
  misc_feature 1..80: note = Synthetic: >SBB-010-cand-3870-3949
  source 1..80: mol_type = other DNA
tttgtgcgtctgtgttcatgggtagtcattataagaccaatgtttacatgatgaacatttgtgttgatggcaatggacaa

SEQ ID NO: 16705 - DNA, 80 bp, synthetic construct
  misc_feature 1..80: note = Synthetic: >SBB-130-cand-3870-3949
  source 1..80: mol_type = other DNA
gtgcgtctgtgtttatgggtagtcattataaaaccaatgtttacatgctgaacatttgtgttgatggcaatggacaaggt

SEQ ID NO: 16706 - DNA, 80 bp, synthetic construct
  misc_feature 1..80: note = Synthetic: >SBB-120-cand-3870-3949
  source 1..80: mol_type = other DNA
tttgtgcgtctgtgtttatgggtaatcattacaaaactaatgtttacatgatgaacatttgtgttgatggcaatggacaa

SEQ ID NO: 16707 - DNA, 80 bp, synthetic construct
  misc_feature 1..80: note = Synthetic: >SBB-130-cand-19520-19599
  source 1..80: mol_type = other DNA
acccccagctacaatctgctgagtggaaatgtggttacgcaatgccatctctttacaaaattcaacgcatgtgcctagag

SEQ ID NO: 16708 - DNA, 80 bp, synthetic construct
  misc_feature 1..80: note = Synthetic: >SBB-788-cand-3680-3759
  source 1..80: mol_type = other DNA
aggtagttaagaaggttaaacgcgataagcgtccgcctcctatattacaacccgatgtttctgagaatggtgcacaaagt

SEQ ID NO: 16709 - DNA, 80 bp, synthetic construct
  misc_feature 1..80: note = Synthetic: >SBB-747-cand-10870-10949
  source 1..80: mol_type = other DNA
acatttatggtgtcagtttttaccaattatacaggtgttgcttgtacatctctgtatgtagcacaatttatggtgtgggt

SEQ ID NO: 16710 - DNA, 80 bp, synthetic construct
  misc_feature 1..80: note = Synthetic: >SBB-797-cand-10880-10959
  source 1..80: mol_type = other DNA
tgtcagtttttaccaattatacaggtgttgcttgtacatctttgtatgtagcacaatttatggtgtgggttgttggatat

SEQ ID NO: 16711 - DNA, 80 bp, synthetic construct
  misc_feature 1..80: note = Synthetic: >SBB-726-cand-8810-8889
  source 1..80: mol_type = other DNA
ctatattgatgggtgctgttttggctgtagtagtatctatggctctttattatctgttacgctttagaagagcatttggt

SEQ ID NO: 16712 - DNA, 80 bp, synthetic construct
  misc_feature 1..80: note = Synthetic: >SBB-788-cand-8800-8879
  source 1..80: mol_type = other DNA
ataacgacatctatattgatgggtgctgttttggctgtagtagtatctatggctctttattatttgttacgctttagaag

SEQ ID NO: 16713 - DNA, 80 bp, synthetic construct
  misc_feature 1..80: note = Synthetic: >SBB-747-cand-8790-8869
  source 1..80: mol_type = other DNA
tgccgttgatataacgacatctatattgatgggtgctgttttggctgtagtagtatctatggctctttattatctgttac

SEQ ID NO: 16714 - DNA, 80 bp, synthetic construct
  misc_feature 1..80: note = Synthetic: >SBB-747-cand-10390-10469
  source 1..80: mol_type = other DNA
gcatttaaatggactttacagtggtgcgctattgtttttgttcttaccatacttatattgctgcaattggcgcagtggac

SEQ ID NO: 16715 - DNA, 80 bp, synthetic construct
  misc_feature 1..80: note = Synthetic: >SBB-797-cand-10400-10479
  source 1..80: mol_type = other DNA
ggactttacagtggtgcgctattgtttttgttcttaccatacttatattgctgcaattggcacagtggacctttgttggt

SEQ ID NO: 16716 - DNA, 80 bp, synthetic construct
  misc_feature 1..80: note = Synthetic: >SBB-797-cand-24480-24559
  source 1..80: mol_type = other DNA
taagcagctgaatgagtcttttattgacctgaagaagttaaatgtttatgaacagaccattaaatggccgtggtatgtat

SEQ ID NO: 16717 - DNA, 80 bp, synthetic construct
  misc_feature 1..80: note = Synthetic: >SBB-726-cand-24480-24559
  source 1..80: mol_type = other DNA
tgttaagcagctgaatgagtcttttattgacctgaagaagttaaatgtttatgaacagaccattaaatggccgtggtatg

SEQ ID NO: 16718 - DNA, 80 bp, synthetic construct
  misc_feature 1..80: note = Synthetic: >SBB-130-cand-13510-13589
  source 1..80: mol_type = other DNA
tctcttcttgtagcctcgtctcctgctcttgttgaccaacgtactgtttgcttttctgtagcagctttgagtaccggtat

SEQ ID NO: 16719 - DNA, 80 bp, synthetic construct
  misc_feature 1..80: note = Synthetic: >SBB-120-cand-13520-13599
  source 1..80: mol_type = other DNA
ttgttgcctcgtctcctgctcttgtggaccaacgtactgtttgtttttctgtagcagctttgagtaccggtatgacgaaa

SEQ ID NO: 16720 - DNA, 80 bp, synthetic construct
  misc_feature 1..80: note = Synthetic: >SBB-120-cand-12640-12719
  source 1..80: mol_type = other DNA
atacttaaagattgtggagccgtagcagcacatgactttttcacatggaaagatgggcgtgcagtttatggtaacattag

SEQ ID NO: 16721 - DNA, 80 bp, synthetic construct
  misc_feature 1..80: note = Synthetic: >SBB-024-cand-12630-12709
  source 1..80: mol_type = other DNA
catatatgacatacttaaagattgtggagccgtagcagcacatgattttttcacatggaaagatgggcgtgcagtttatg

SEQ ID NO: 16722 - DNA, 80 bp, synthetic construct
  misc_feature 1..80: note = Synthetic: >PRD-0038-cand-15590-15669
  source 1..80: mol_type = other DNA
atagcaactatgcagcacaaggtctagtggctagcattaagaactttaaagcagttctttactatcaaaacaatgtattc

SEQ ID NO: 16723 - DNA, 80 bp, synthetic construct
  misc_feature 1..80: note = Synthetic: >PDF-2386-cand-15600-15679
  source 1..80: mol_type = other DNA
tgcagcacaaggtctagtggctagcattaagaactttaaagcagttctttactatcaaaacaatgtattcatgtctgaag

SEQ ID NO: 16724 - DNA, 80 bp, synthetic construct
  misc_feature 1..80: note = Synthetic: >PRD-0038-cand-9440-9519
  source 1..80: mol_type = other DNA
tacttgtatcttacattttactttactaatgatgtttcattcttggctcacctccaatggttagcgatgttttcacctat

SEQ ID NO: 16725 - DNA, 80 bp, synthetic construct
  misc_feature 1..80: note = Synthetic: >PRD-0038-cand-17030-17109
  source 1..80: mol_type = other DNA
atgcactatgtgagaaggcattgaaatatttgcctatagacaaatgtactagaatagtaccagcgcgtgctcgtgttgaa

SEQ ID NO: 16726 - DNA, 80 bp, synthetic construct
  misc_feature 1..80: note = Synthetic: >PDF-2386-cand-17040-17119
  source 1..80: mol_type = other DNA
tgagaaggcattgaaatatttgcctatagacaaatgtactagaatagtaccagcgcgtgctcgtgttgaatgctttgaca

SEQ ID NO: 16727 - DNA, 80 bp, synthetic construct
  misc_feature 1..80: note = Synthetic: >SBB-726-cand-19460-19539
  source 1..80: mol_type = other DNA
gaagtgcatatgtactaaaggtcctcctcacgcctctataaatggcgttattgttgaggccgcagatagaggtactgcat

SEQ ID NO: 16728 - DNA, 80 bp, synthetic construct
  misc_feature 1..80: note = Synthetic: >SBB-788-cand-19450-19529
  source 1..80: mol_type = other DNA
caagcagaccgaagtgcatatgtactaaaggtcctcctcacgcctctataaatggcgttattgttgaggccgcagataga

SEQ ID NO: 16729 - DNA, 80 bp, synthetic construct
  misc_feature 1..80: note = Synthetic: >SBB-726-cand-18580-18659
  source 1..80: mol_type = other DNA
atggcctggccatgttctggaattgcaatgtggattgttatccacacaatgcattagtctgtagatttgacacacgtgtg

SEQ ID NO: 16730 - DNA, 80 bp, synthetic construct
  misc_feature 1..80: note = Synthetic: >SBB-747-cand-18570-18649
  source 1..80: mol_type = other DNA
cagttcaaggatggcctggccatgttttggaattgcaatgtggactgttatccacacaacgcattagtctgtagatttga

SEQ ID NO: 16731 - DNA, 80 bp, synthetic construct
  misc_feature 1..80: note = Synthetic: >SBB-010-cand-26640-26719
  source 1..80: mol_type = other DNA
ctttgattcctgaattgatcaactaaactatgatcggtcaaatattctttctcctagctcttctagcaccaatcttacat

SEQ ID NO: 16732 - DNA, 80 bp, synthetic construct
  misc_feature 1..80: note = Synthetic: >SBB-053-cand-26630-26709
  source 1..80: mol_type = other DNA
tctttgattcctgaattgatcaactaaactatgatcggtcaaatattctggctcctagcactcttagcaccaatactgca

SEQ ID NO: 16733 - DNA, 80 bp, synthetic construct
  misc_feature 1..80: note = Synthetic: >PDF-2386-cand-9680-9759
  source 1..80: mol_type = other DNA
atgtacctaaagttgcgtagtgaagcacttttgcccattacgcaatataataggtatcttgctttgtataacaagtacaa

SEQ ID NO: 16734 - DNA, 80 bp, synthetic construct
  misc_feature 1..80: note = Synthetic: >SBB-010-cand-1230-1309
  source 1..80: mol_type = other DNA
gtgtcattaaattgcagagtgttaatgggtttgttgcctcagctagttacaacgtagctgagtacacctatttagcagac

SEQ ID NO: 16735 - DNA, 80 bp, synthetic construct
  misc_feature 1..80: note = Synthetic: >SBB-122-cand-18350-18429
  source 1..80: mol_type = other DNA
gtattacacgttgtaatattggaggtgctgtttgtagcacacatgcgtcgcagtatcacgcttatgttaattcttacaat

SEQ ID NO: 16736 - DNA, 80 bp, synthetic construct
  misc_feature 1..80: note = Synthetic: >SBB-010-cand-26080-26159
  source 1..80: mol_type = other DNA
attgttgctgctgtaaaacaagccctacaagaacttggagtaacacccaagaatcagcagggcaacaatggtaaacaaaa

SEQ ID NO: 16737 - DNA, 80 bp, synthetic construct
  misc_feature 1..80: note = Synthetic: >SBB-053-cand-26070-26149
  source 1..80: mol_type = other DNA
cattgttgctgctgtaaaacaagccctacaagaacttggagtaacacccaagaatcagcagggcaacaatggtaaacaaa

SEQ ID NO: 16738 - DNA, 80 bp, synthetic construct
  misc_feature 1..80: note = Synthetic: >PRD-0038-cand-19350-19429
  source 1..80: mol_type = other DNA
tgcatctgagtacagacaatacttagatgcttacaacatgatgatatcggcaggttttagtctatggatttataaacaat

SEQ ID NO: 16739 - DNA, 80 bp, synthetic construct
  misc_feature 1..80: note = Synthetic: >PDF-2386-cand-19360-19439
  source 1..80: mol_type = other DNA
tacagacaatacttagatgcttacaacatgatgatatcggcaggttttagtctatggatttataaacaatttgatactta

SEQ ID NO: 16740 - DNA, 80 bp, synthetic construct
  misc_feature 1..80: note = Synthetic: >PDF-2386-cand-19040-19119
  source 1..80: mol_type = other DNA
tttggaattgtaatgttgatcgttacccctccaatgcaattgtatgtagatttgacaccagagttttgtctaatctaaat

SEQ ID NO: 16741 - DNA, 80 bp, synthetic construct
  misc_feature 1..80: note = Synthetic: >PRD-0038-cand-19030-19109
  source 1..80: mol_type = other DNA
gtttgtttgttttggaattgtaatgttgatcgttatccctccaatgcaattgtatgtagatttgacaccagagttttgtc

SEQ ID NO: 16742 - DNA, 80 bp, synthetic construct
  misc_feature 1..80: note = Synthetic: >SBB-747-cand-14470-14549
  source 1..80: mol_type = other DNA
tgaatttgaagtatgctataagtgcgaaaaatcgtgctcgcaccgtggcaggtgtttctatagcatctactatgacaaat

SEQ ID NO: 16743 - DNA, 80 bp, synthetic construct
  misc_feature 1..80: note = Synthetic: >PRD-0038-cand-12400-12479
  source 1..80: mol_type = other DNA
gtgggaaatacaacaagttgtagatgcagatagtaaaatagtccaactaagtgaaattaacatggacaattcacaaaacc

SEQ ID NO: 16744 - DNA, 80 bp, synthetic construct
  misc_feature 1..80: note = Synthetic: >PRD-0038-cand-7040-7119
  source 1..80: mol_type = other DNA
gttaccatttcttcatacaagttagacttaacttgtgtgggtctggttgctgaatgggttttagcatatattttgtttac

SEQ ID NO: 16745 - DNA, 80 bp, synthetic construct
  misc_feature 1..80: note = Synthetic: >SBB-788-cand-16480-16559
  source 1..80: mol_type = other DNA
tacagggtccaccaggtactgggaagagccatttgtcaataggacttgcgctctactacccatcagctaaaatcgtttac

SEQ ID NO: 16746 - DNA, 80 bp, synthetic construct
  misc_feature 1..80: note = Synthetic: >SBB-747-cand-16470-16549
  source 1..80: mol_type = other DNA
tataccacagtacagggtccaccaggtactgggaagagccatttgtcaataggacttgcgctctactacccatcagctaa

SEQ ID NO: 16747 - DNA, 80 bp, synthetic construct
  misc_feature 1..80: note = Synthetic: >SBB-797-cand-16480-16559
  source 1..80: mol_type = other DNA
tacagggtccaccaggcactgggaagagccatttgtcaataggacttgcgctctactacccatcagctaaaatcgtgtac

SEQ ID NO: 16748 - DNA, 80 bp, synthetic construct
  misc_feature 1..80: note = Synthetic: >SBB-788-cand-15440-15519
  source 1..80: mol_type = other DNA
tgcatacccacttactaaacattccgatcctgagtatcaaaatgttttctggtgttatctacaatatataaagaagttac

SEQ ID NO: 16749 - DNA, 80 bp, synthetic construct
  misc_feature 1..80: note = Synthetic: >SBB-747-cand-15430-15509
  source 1..80: mol_type = other DNA
ttgctattgatgcatacccacttactaaacattccgatcctgagtatcaaaatgttttctggtgttatctacaatatata

SEQ ID NO: 16750 - DNA, 80 bp, synthetic construct
  misc_feature 1..80: note = Synthetic: >SBB-010-cand-14110-14189
  source 1..80: mol_type = other DNA
tctatagtcaacacacgtggagcggctgttgtaattggtaccactaaattttatggtggttgggacaacatgctgcgtac

SEQ ID NO: 16751 - DNA, 80 bp, synthetic construct
  misc_feature 1..80: note = Synthetic: >SBB-010-cand-16410-16489
  source 1..80: mol_type = other DNA
gattactcgcggggtattggaacctaaagattataatgttgttacacgccgtatgtgtgctattggtcctgacgtgtttt

SEQ ID NO: 16752 - DNA, 80 bp, synthetic construct
  misc_feature 1..80: note = Synthetic: >SBB-130-cand-16410-16489
  source 1..80: mol_type = other DNA
tactcgcggggtgttggaacctaaagattataatgttgttacacgccgtatgtgtgctattggtcctgacgtgtttttac

SEQ ID NO: 16753 - DNA, 80 bp, synthetic construct
  misc_feature 1..80: note = Synthetic: >GCS-211-cand-7690-7769
  source 1..80: mol_type = other DNA
tgtaaaaatgctcttaacattgacgcatcagatgaggactttgtcaatgctgtttctaatgcacacaggtatgatgtttt

SEQ ID NO: 16754 - DNA, 80 bp, synthetic construct
  misc_feature 1..80: note = Synthetic: >GCS-227-cand-7690-7769
  source 1..80: mol_type = other DNA
taaaaatgctcttaacattgacgcatcagatgaggactttgtcaatgctgtttctaatgcacacaggtatgatgttttgt

SEQ ID NO: 16755 - DNA, 80 bp, synthetic construct
  misc_feature 1..80: note = Synthetic: >GCS-227-cand-4970-5049
  source 1..80: mol_type = other DNA
gtttctccttgtagagtcgagggttcattccaattcttttcacactcaaatattggtgccttaaaacccgacaaagtttt

SEQ ID NO: 16756 - DNA, 80 bp, synthetic construct
  misc_feature 1..80: note = Synthetic: >GCS-211-cand-4970-5049
  source 1..80: mol_type = other DNA
ctgtttctccttgtagagtcgagggttcattccaattcttttcacactcaaatattggtgccttaaaacccgacaaagtt

SEQ ID NO: 16757 - DNA, 80 bp, synthetic construct
  misc_feature 1..80: note = Synthetic: >SBB-010-cand-16170-16249
  source 1..80: mol_type = other DNA
tcgcattatacctgctagagcacgtgttgagtgtttcaacggtttcaaacctaataacaatagtgcccagtacatctttt

SEQ ID NO: 16758 - DNA, 80 bp, synthetic construct
  misc_feature 1..80: note = Synthetic: >SBB-130-cand-16170-16249
  source 1..80: mol_type = other DNA
cattatacctgctagagcacgtgttgagtgtttcaacggttttaaacccaataacaatagtgcacagtacatcttttcaa

SEQ ID NO: 16759 - DNA, 80 bp, synthetic construct
  misc_feature 1..80: note = Synthetic: >GCS-211-cand-15430-15509
  source 1..80: mol_type = other DNA
atcgtcaagtcttttatgttttgctcgattgggtgaagcatcttaataagagcttgactgcaggtatcttggatgctttt

SEQ ID NO: 16760 - DNA, 80 bp, synthetic construct
  misc_feature 1..80: note = Synthetic: >GCS-227-cand-15430-15509
  source 1..80: mol_type = other DNA
cgtcaagtcttttatgttttgctcgattgggtgaagcatcttaataagagcttgactgcaggtatcttggatgctttttc

SEQ ID NO: 16761 - DNA, 80 bp, synthetic construct
  misc_feature 1..80: note = Synthetic: >GCS-211-cand-19030-19109
  source 1..80: mol_type = other DNA
accgtgtgatggtgcgagaaggtgtcaatgacacttgtgtgtttactaatagcacctctctacctactaatatcgctttt

SEQ ID NO: 16762 - DNA, 80 bp, synthetic construct
  misc_feature 1..80: note = Synthetic: >GCS-227-cand-19020-19099
  source 1..80: mol_type = other DNA
tattggtgaccgtgtgatggtgcgagaaggtgtcaatgacacttgtgtgtttattaatagcacctctctacctactaata

SEQ ID NO: 16763 - DNA, 80 bp, synthetic construct
  misc_feature 1..80: note = Synthetic: >GCS-227-cand-1450-1529
  source 1..80: mol_type = other DNA
catcatgaagcgtccaccctggttcgtgactaagctcaagaaccttttgggcgacgtttggtctggtttcactgcctttt

SEQ ID NO: 16764 - DNA, 80 bp, synthetic construct
  misc_feature 1..80: note = Synthetic: >GCS-211-cand-1450-1529
  source 1..80: mol_type = other DNA
aacatcatggagcgttcaccctggttcgtgactaagctcaagaaccttttgggcgacgtttggtctggtttcactgcctt

SEQ ID NO: 16765 - DNA, 80 bp, synthetic construct
  misc_feature 1..80: note = Synthetic: >GCS-211-cand-5290-5369
  source 1..80: mol_type = other DNA
aaaataaaaggtgtggtcgcttgtgaggtctcttcctgttttgatgagctaaagaaccatttgcccacaagctttaagtt

SEQ ID NO: 16766 - DNA, 80 bp, synthetic construct
  misc_feature 1..80: note = Synthetic: >GCS-227-cand-5290-5369
  source 1..80: mol_type = other DNA
aataaaaggtgtggtcgcttgtgaggtctcttcctgttttgatgagctaaaggaccatttgcccacaagctttaagtttg

SEQ ID NO: 16767 - DNA, 80 bp, synthetic construct
  misc_feature 1..80: note = Synthetic: >DQ011855_1-cand-40-119
  source 1..80: mol_type = other DNA
ctaacgctactaagtgtacttgctggtgccaaccagatccttccacatataaaggtgtaaatgcttggacttgtccgcaa

SEQ ID NO: 16768 - DNA, 80 bp, synthetic construct
  misc_feature 1..80: note = Synthetic: >DQ022305_1-cand-0-79
  source 1..80: mol_type = other DNA
atttaattgtacatatgaccgagtggaaaagagttttcaacttgacactactcctaaaactggaaattttaaagacctac

SEQ ID NO: 16769 - DNA, 80 bp, synthetic construct
  misc_feature 1..80: note = Synthetic: >DQ022305_1-cand-280-359
  source 1..80: mol_type = other DNA
gctgcttattatgttggtaatcttaaatattctaccttcatgctccgatttaatgaaaatgggacgatcacggatgctgt

SEQ ID NO: 16770 - DNA, 80 bp, synthetic construct
  misc_feature 1..80: note = Synthetic: >DQ071615_1-cand-0-79
  source 1..80: mol_type = other DNA
gcaggattatttcctgccatttgattcaaatttaacacagtacttttctcttaatgttgattcagataggtttacctact

SEQ ID NO: 16771 - DNA, 80 bp, synthetic construct
  misc_feature 1..80: note = Synthetic: >DQ071615_1-cand-210-289
  source 1..80: mol_type = other DNA
ttccacacacattattatacgtgtgtgcaacttcaacttatgtaaagaacctatgtatacagtgtctcgtggtgcacaac

SEQ ID NO: 16772 - DNA, 80 bp, synthetic construct
  misc_feature 1..80: note = Synthetic: >DQ071615_1-cand-390-469
  source 1..80: mol_type = other DNA
cctacgtgagtatgtctttaagaatcgggatggctttctcagtgtttaccaaacttatacagctgttaatttacctagag

SEQ ID NO: 16773 - DNA, 80 bp, synthetic construct
  misc_feature 1..80: note = Synthetic: >DQ071615_1-cand-660-739
  source 1..80: mol_type = other DNA
tattaccaatgctattgattgtgctcaaaacccacttgctgaactaaaatgcaccattaaaaatttcaatgtcagcaagg

SEQ ID NO: 16774 - DNA, 80 bp, synthetic construct
  misc_feature 1..80: note = Synthetic: >DQ071615_1-cand-750-829
  source 1..80: mol_type = other DNA
aacatctaacttcagagtttcgccaactcaggaagttattagattcccaaacattacaaatcgttgtccttttgacaaag

SEQ ID NO: 16775 - DNA, 80 bp, synthetic construct
  misc_feature 1..80: note = Synthetic: >DQ071615_1-cand-840-919
  source 1..80: mol_type = other DNA
tacacgctttcctaatgtgtatgcgtgggagagaactaaaatttctgattgtgttgctgactacactgttctctacaact

SEQ ID NO: 16776 - DNA, 80 bp, synthetic construct
  misc_feature 1..80: note = Synthetic: >DQ071615_1-cand-930-1009
  source 1..80: mol_type = other DNA
ctcaacttttaagtgctatggagtttctccttctaagttgattgatttatgctttacaagtgtgtatgctgacacattct

SEQ ID NO: 16777 - DNA, 80 bp, synthetic construct; identical to SEQ ID NO: 16768
  misc_feature 1..80: note = Synthetic: >DQ084199_1-cand-0-79
  source 1..80: mol_type = other DNA

SEQ ID NO: 16778 - DNA, 80 bp, synthetic construct; identical to SEQ ID NO: 16769
  misc_feature 1..80: note = Synthetic: >DQ084199_1-cand-280-359
  source 1..80: mol_type = other DNA

SEQ ID NO: 16779 - DNA, 80 bp, synthetic construct; identical to SEQ ID NO: 16768
  misc_feature 1..80: note = Synthetic: >DQ084200_1-cand-0-79
  source 1..80: mol_type = other DNA

SEQ ID NO: 16780 - DNA, 80 bp, synthetic construct; identical to SEQ ID NO: 16769
  misc_feature 1..80: note = Synthetic: >DQ084200_1-cand-280-359
  source 1..80: mol_type = other DNA

SEQ ID NO: 16781 - DNA, 80 bp, synthetic construct
  misc_feature 1..80: note = Synthetic: >DQ201447_1-cand-130-209
  source 1..80: mol_type = other DNA
tatgctgtatggcctacaatggtttgcagatgcggttgttgcttatttacatggtgctagttaccgtattagttttgaaa

SEQ ID NO: 16782 - DNA, 80 bp, synthetic construct
  misc_feature 1..80: note = Synthetic: >DQ412043_2-cand-0-79
  source 1..80: mol_type = other DNA
atttttggttacaggagtgtttgacattgttaagggtcaaatacaagtggcttcagataatctcaaggaatgtgtaaaag

SEQ ID NO: 16783 - DNA, 80 bp, synthetic construct
  misc_feature 1..80: note = Synthetic: >DQ443743_1-cand-220-299
  source 1..80: mol_type = other DNA
tggtggtttaatcctgtttatgatgtcagttattatagggttaataataaaaatggtactaccgtattttccaattgcac

SEQ ID NO: 16784 - DNA, 80 bp, synthetic construct; identical to SEQ ID NO: 16781
  misc_feature 1..80: note = Synthetic: >DQ811785_1-cand-130-209
  source 1..80: mol_type = other DNA

SEQ ID NO: 16785 - DNA, 80 bp, synthetic construct; identical to SEQ ID NO: 16781
  misc_feature 1..80: note = Synthetic: >DQ811786_1-cand-130-209
  source 1..80: mol_type = other DNA

SEQ ID NO: 16786 - DNA, 80 bp, synthetic construct
  misc_feature 1..80: note = Synthetic: >DQ848678_1-cand-40-119
  source 1..80: mol_type = other DNA
tgacttttttgaacactacatatacgaattttcaagacattgtggttgattacattgatattaacaagactatcgctgat

SEQ ID NO: 16787 - DNA, 80 bp, synthetic construct
  misc_feature 1..80: note = Synthetic: >DQ848678_2-cand-120-199
  source 1..80: mol_type = other DNA
aactttgtgttttgatgtgagtccagtagtcgcaggttgtaagtgggcattagtccatgactataactggcgtacacagt

SEQ ID NO: 16788 - DNA, 80 bp, synthetic construct
  misc_feature 1..80: note = Synthetic: >DQ848678_2-cand-210-289
  source 1..80: mol_type = other DNA
cactgtttcttataaagaaggtgctatgatcactactatgccaaaggcacagctgggttttcaagacatctctaagttgg

SEQ ID NO: 16789 - DNA, 80 bp, synthetic construct
  misc_feature 1..80: note = Synthetic: >DQ848678_2-cand-300-379
  source 1..80: mol_type = other DNA
gtgcactgactataacatatatggatttcagggcacaggtattattagaaaaaccacctcacgtttagtagctggccttt

SEQ ID NO: 16790 - DNA, 80 bp, synthetic construct
  misc_feature 1..80: note = Synthetic: >DQ848678_2-cand-380-459
  source 1..80: mol_type = other DNA
actacacatctattagtggtgatcttcttgcatttaaaaatagcactacaggtgaaatcttcaccgtagtgccatgtgat

SEQ ID NO: 16791 - DNA, 80 bp, synthetic construct
  misc_feature 1..80: note = Synthetic: >DQ848678_2-cand-460-539
  source 1..80: mol_type = other DNA
ttaacagcacaagctgcagtgattaatgatgaaatagttggagttataacagctgttaatcaaactgatttgtttgagtt

SEQ ID NO: 16792 - DNA, 80 bp, synthetic construct
  misc_feature 1..80: note = Synthetic: >DQ848678_2-cand-540-619
  source 1..80: mol_type = other DNA
tgtaaatcacacacaaccgagacaatcacgtaggtcagcaaatccaacaactgtgcaaacttatactatgtcacaatttt

SEQ ID NO: 16793 - DNA, 80 bp, synthetic construct
  misc_feature 1..80: note = Synthetic: >DQ848678_2-cand-630-709
  source 1..80: mol_type = other DNA
aaaatggaataatgacacctctactaattgtacatctttcatcacatattcctcttttgctatttgtaatacaggtgaga

SEQ ID NO: 16794 - DNA, 80 bp, synthetic construct
  misc_feature 1..80: note = Synthetic: >DQ848678_2-cand-710-789
  source 1..80: mol_type = other DNA
ttaaatacgttaatgtcacgcatgtggaaactgtagatgatagtataggtgttatcaaacctatttcaacaggcaacata

SEQ ID NO: 16795 - DNA, 80 bp, synthetic construct
  misc_feature 1..80: note = Synthetic: >DQ848678_2-cand-790-869
  source 1..80: mol_type = other DNA
tctatacctaaaaacttcactgtcgcagttcaagctgaatactttcaaattcaagtcaaacctgttgtggttgattgtgc

SEQ ID NO: 16796 - DNA, 80 bp, synthetic construct
  misc_feature 1..80: note = Synthetic: >DQ848678_2-cand-870-949
  source 1..80: mol_type = other DNA
taagtatgtctgcaatggtaatagacattgccttagtttgctagcacaatacacttcagcttgtcatacaattgaaaatg

SEQ ID NO: 16797 - DNA, 80 bp, synthetic construct
  misc_feature 1..80: note = Synthetic: >DQ848678_3-cand-100-179
  source 1..80: mol_type = other DNA
ttcctatataaacacgcaagttttgaatataccgaatgttcatggcgtctactttgacgtacgtgaacatgactctgatg

SEQ ID NO: 16798 - DNA, 80 bp, synthetic construct
  misc_feature 1..80: note = Synthetic: >DQ848678_3-cand-190-269
  source 1..80: mol_type = other DNA
ccagcaagacaaggttggcctattgattgccatacatggtaactcgcattacagtctgcttatggttttgcaagacggcg

SEQ ID NO: 16799 - DNA, 80 bp, synthetic construct
  misc_feature 1..80: note = Synthetic: >DQ848678_3-cand-280-359
  source 1..80: mol_type = other DNA
tcagcctcacgtagctgtaaaaatctgccattggaagccaagtaatataagctcctatcatcaatttaatgttaatctag

SEQ ID NO: 16800 - DNA, 80 bp, synthetic construct
  misc_feature 1..80: note = Synthetic: >DQ848678_3-cand-370-449
  source 1..80: mol_type = other DNA
ttactgtgttttcaatcggagattctcattggacaccgtgttgacaactaatgatttctatggctttcagtggactgaca

SEQ ID NO: 16801 - DNA, 80 bp, synthetic construct
  misc_feature 1..80: note = Synthetic: >DQ848678_3-cand-460-539
  source 1..80: mol_type = other DNA
catctacttaggaggcactgtcaccaaagtgtggattggcaatgattggagcattgttgaagccagtatctcttatcatt

SEQ ID NO: 16802 - DNA, 80 bp, synthetic construct
  misc_feature 1..80: note = Synthetic: >DQ848678_3-cand-540-619
  source 1..80: mol_type = other DNA
ggaatcagcttaattatggttattatctgcaatttgtcaaccgcactacctattacacttacaacagcactgccggttct

SEQ ID NO: 16803 - DNA, 80 bp, synthetic construct
  misc_feature 1..80: note = Synthetic: >DQ848678_3-cand-630-709
  source 1..80: mol_type = other DNA
atcttcagttggcagaatgtaccagtgaatactgcgctggttatgttaagaacgtctttgtgccaattgatggcaagata

SEQ ID NO: 16804 - DNA, 80 bp, synthetic construct
  misc_feature 1..80: note = Synthetic: >DQ848678_3-cand-720-799
  source 1..80: mol_type = other DNA
tttcctttagtaactggtttctgttatcagataaatctacattggtacagggtcgtgttctcagtaaacagccagttttt

SEQ ID NO: 16805 - DNA, 80 bp, synthetic construct
  misc_feature 1..80: note = Synthetic: >DQ848678_3-cand-790-869
  source 1..80: mol_type = other DNA
gccagtttttgtacattgccttagacctgtgccatcatggtccaataacagcgctgtggtgcattttagtgatgatcctt

SEQ ID NO: 16806 - DNA, 80 bp, synthetic construct
  misc_feature 1..80: note = Synthetic: >DQ848678_3-cand-880-959
  source 1..80: mol_type = other DNA
tgttacagcggaggttttaaggttcaacctcatttttagcgatactgctgtttatacggagtcaactagtgatgatcagt

SEQ ID NO: 16807 - DNA, 80 bp, synthetic construct
  misc_feature 1..80: note = Synthetic: >DQ848678_3-cand-970-1049
  source 1..80: mol_type = other DNA
atttgaagataactcaactgcatctatagcctgttatagcagtgataatgtcactgataaccaacccgtagataacactc

SEQ ID NO: 16808 - DNA, 80 bp, synthetic construct
  misc_feature 1..80: note = Synthetic: >DQ848678_3-cand-1060-1139
  source 1..80: mol_type = other DNA
cccctttggcaaaattacgcattcatacttgtgttttgccaatttctcaaatgctcctgtgagtatgcaatttttgggca

SEQ ID NO: 16809 - DNA, 80 bp, synthetic construct
  misc_feature 1..80: note = Synthetic: >DQ848678_3-cand-1140-1219
  source 1..80: mol_type = other DNA
tattgccacctactgtgcgcgaatttgcgttcggcagagatggatctatttttgttaatggctataaatactttagtttt

SEQ ID NO: 16810 - DNA, 80 bp, synthetic construct
  misc_feature 1..80: note = Synthetic: >EF065513_1-cand-0-79
  source 1..80: mol_type = other DNA
tgttgtttcacattctattttgcctttcgcaagtttgcatggtgatttggcttatattttcagccaatttttatgttagt

SEQ ID NO: 16811 - DNA, 80 bp, synthetic construct
  misc_feature 1..80: note = Synthetic: >EF065513_1-cand-130-209
  source 1..80: mol_type = other DNA
acgtaccatactctctattaagctcaggtcaatggcaccttttatgtctatggctgataatttcgctataattaagacga

SEQ ID NO: 16812 - DNA, 80 bp, synthetic construct
  misc_feature 1..80: note = Synthetic: >EF065513_2-cand-0-79
  source 1..80: mol_type = other DNA
tgctatatgattgtgtgtttgattttactgttgttgttgatagtttacctacacatcaattgcaatgttatggcgtgtcc

SEQ ID NO: 16813 - DNA, 80 bp, synthetic construct
  misc_feature 1..80: note = Synthetic: >EF065513_2-cand-100-179
  source 1..80: mol_type = other DNA
gtgttatggtagtgtaacgctcgatgttatgcgcattaatgagacgcatttgaataatttgtttaatcgcgtaccagata

SEQ ID NO: 16814 - DNA, 80 bp, synthetic construct
  misc_feature 1..80: note = Synthetic: >EF065513_3-cand-0-79
  source 1..80: mol_type = other DNA
gtattagagtggatgctgacacattggataaccccacttgtgccactttcatagctaatttagattgtgatactaaggct

SEQ ID NO: 16815 - DNA, 80 bp, synthetic construct
  misc_feature 1..80: note = Synthetic: >EF065513_4-cand-0-79
  source 1..80: mol_type = other DNA
taagcaagttttggctaacccccgctggtacttctattatactggcactggtcgctttggtgaccttcgttttgggacta

SEQ ID NO: 16816 - DNA, 80 bp, synthetic construct
  misc_feature 1..80: note = Synthetic: >EF065513_4-cand-260-339
  source 1..80: mol_type = other DNA
actcaagcagagcatcatcgcgtggtaactcacgtgctagctcccgtggtgcatcacccggtagacctgctgctaacccg

SEQ ID NO: 16817 - DNA, 80 bp, synthetic construct
  misc_feature 1..80: note = Synthetic: >EF065513_5-cand-0-79
  source 1..80: mol_type = other DNA
ctcccgcgccgtgacggagcccgtatctgttttatggtctgctagtgcaacggctcaggatgcatttgacacaccatctg

SEQ ID NO: 16818 - DNA, 80 bp, synthetic construct
  misc_feature 1..80: note = Synthetic: >EF065513_5-cand-50-129
  source 1..80: mol_type = other DNA
cggctcaggatgcatttgacacaccatctggttgcgtggttaatgttgaactacgtaatactactatagttaatacatgt

SEQ ID NO: 16819 - DNA, 80 bp, synthetic construct
  misc_feature 1..80: note = Synthetic: >EF065513_5-cand-180-259
  source 1..80: mol_type = other DNA
ggctaatgcagatagtttacctcgactgcagttagtcaattatgatccattgtatgacaactctactgcgactcctatga

SEQ ID NO: 16820 - DNA, 80 bp, synthetic construct
  misc_feature 1..80: note = Synthetic: >EF065513_5-cand-310-389
  source 1..80: mol_type = other DNA
gaggagtacatccagactactgcacctaagattactattgattgtgcacgttacttgtgcggtgattcctcacggtgcct

SEQ ID NO: 16821 - DNA, 80 bp, synthetic construct
  misc_feature 1..80: note = Synthetic: >EF065513_6-cand-0-79
  source 1..80: mol_type = other DNA
taaggctaaagtttcaaatgttttgttaccagatccatacatagcgtactctggtcaaactttgcgtcagaatttgttta

SEQ ID NO: 16822 - DNA, 80 bp, synthetic construct
  misc_feature 1..80: note = Synthetic: >EF065513_6-cand-90-169
  source 1..80: mol_type = other DNA
gtctaataccattctataccctgtaacgccacctgcgaatggtgctaatggcgggttcatttataatacttctattattc

SEQ ID NO: 16823 - DNA, 80 bp, synthetic construct
  misc_feature 1..80: note = Synthetic: >EF065513_6-cand-180-259
  source 1..80: mol_type = other DNA
aggtctatttgtgaatacttggatgtataggcaacctgcgtcttcgcgtgcttattgtcaagagccttttggtgtagctt

SEQ ID NO: 16824 - DNA, 80 bp, synthetic construct
  misc_feature 1..80: note = Synthetic: >EF065513_6-cand-270-349
  source 1..80: mol_type = other DNA
atttgaaaatgacaggattgctattcttattatggccccagataacttaggttcttggagtgctgtggcgcctagaaatc

SEQ ID NO: 16825 - DNA, 80 bp, synthetic construct
  misc_feature 1..80: note = Synthetic: >EF065513_6-cand-360-439
  source 1..80: mol_type = other DNA
ttatttattggtttgtagtaatgcgaccctatgcataaaccctggttttaacaggtggggtcctgctggtagctttatag

SEQ ID NO: 16826 - DNA, 80 bp, synthetic construct
  misc_feature 1..80: note = Synthetic: >EF065513_6-cand-580-659
  source 1..80: mol_type = other DNA
acgtctaattttgaacatggtttcagtaggggtagtcatcctatgacatattttatgtcgttgcctgtcggcggaaattt

SEQ ID NO: 16827 - DNA, 80 bp, synthetic construct
  misc_feature 1..80: note = Synthetic: >EF065513_7-cand-0-79
  source 1..80: mol_type = other DNA
gtaccacaggttcatgcatttcgcagtctgcttcctgtgttactggtgacattgttaatgtcacccaggtggaccgtaca

SEQ ID NO: 16828 - DNA, 80 bp, synthetic construct
  misc_feature 1..80: note = Synthetic: >EF065513_7-cand-100-179
  source 1..80: mol_type = other DNA
cttccgtcatattaaatacactgatgttggtcgtactttcaggattaagttttctgatgtcacttgctcctgggaaaata

SEQ ID NO: 16829 - DNA, 80 bp, synthetic construct
  misc_feature 1..80: note = Synthetic: >EF065513_7-cand-200-279
  source 1..80: mol_type = other DNA
tttcctggtaaccacattttgcagttcactgttttaggtgtttgttttgataataaggttgttggtggttgccagaacat

SEQ ID NO: 16830 - DNA, 80 bp, synthetic construct
  misc_feature 1..80: note = Synthetic: >EF065513_7-cand-300-379
  source 1..80: mol_type = other DNA
cccatacggtgtttcatttgcagcgcgaagatataactttgcttgagctatgtgttcaagctgcaggatttaatgcccag

SEQ ID NO: 16831 - DNA, 80 bp, synthetic construct
  misc_feature 1..80: note = Synthetic: >EF065513_7-cand-500-579
  source 1..80: mol_type = other DNA
ggtaatgcattagctgctaatgttctgttgaacatttgccagcagatgcagaccgatattcatcaacatgggttccacat

SEQ ID NO: 16832 - DNA, 80 bp, synthetic construct
  misc_feature 1..80: note = Synthetic: >EF065513_7-cand-600-679
  source 1..80: mol_type = other DNA
gtgcagttgcatggtgtttagctagattgtctgaggagttcgatgtccctgatgagacacctttcatctacatattgtgt

SEQ ID NO: 16833 - DNA, 80 bp, synthetic construct
  misc_feature 1..80: note = Synthetic: >EF065514_2-cand-0-79
  source 1..80: mol_type = other DNA
tcgacacaacgtataattttactggtctcctaggctgtgtaggttccagctgtagtagtacttacaggtctgcactttca

SEQ ID NO: 16834 - DNA, 80 bp, synthetic construct
  misc_feature 1..80: note = Synthetic: >EF065514_2-cand-50-129
  source 1..80: mol_type = other DNA
tgtagtagtacttacaggtctgcactttcagacctattatacaataaagttaaggttacggaccccggctttatgagttc

SEQ ID NO: 16835 - DNA, 80 bp, synthetic construct
  misc_feature 1..80: note = Synthetic: >EF065514_2-cand-170-249
  source 1..80: mol_type = other DNA
gatttgttttgtacgcaaaactttaatggcatctccgtattacctcctatagtgtcacctggtatgcaggcgttgtacac

SEQ ID NO: 16836 - DNA, 80 bp, synthetic construct
  misc_feature 1..80: note = Synthetic: >EF065514_3-cand-140-219
  source 1..80: mol_type = other DNA
gtttcccgtaagggaacacctcccgctcagggtgctaataataatgatggtagttgtttggcgtttcagaacaatcttta

SEQ ID NO: 16837 - DNA, 80 bp, synthetic construct
  misc_feature 1..80: note = Synthetic: >EF065514_3-cand-250-329
  source 1..80: mol_type = other DNA
agtttcctatgatgacaatgggtttcccaccgcagtagcagactgttcgtatgatgcaggtgatgagttgtactgtgtga

SEQ ID NO: 16838 - DNA, 80 bp, synthetic construct
  misc_feature 1..80: note = Synthetic: >EF065514_4-cand-0-79
  source 1..80: mol_type = other DNA
atatcacttaaacctgcatctggtaggaagttagtgtgtcctagcgttaatgatacagacatgcgcaccaatgagtgcgt

SEQ ID NO: 16839 - DNA, 80 bp, synthetic construct
  misc_feature 1..80: note = Synthetic: >EF065514_4-cand-120-199
  source 1..80: mol_type = other DNA
aatgtatctacattgaccattcctgattctaagttatttgttgctaatggtgctggtgacattatagcagcgagtgttaa

SEQ ID NO: 16840 - DNA, 80 bp, synthetic construct
  misc_feature 1..80: note = Synthetic: >EF065514_4-cand-240-319
  source 1..80: mol_type = other DNA
gtttctgtagggtatgaccctaattttgagcgcgcgctattatttaacggactagcatgtaaagagcgcgcagtagccgt

SEQ ID NO: 16841 - DNA, 80 bp, synthetic construct
  misc_feature 1..80: note = Synthetic: >EF065516_1-cand-40-119
  source 1..80: mol_type = other DNA
tcaatggcagttttaacctaggtggctggggctcacgtcaagtgacactgtccatactaggctatggttttggacaaaac

SEQ ID NO: 16842 - DNA, 80 bp, synthetic construct
  misc_feature 1..80: note = Synthetic: >EF065516_2-cand-40-119
  source 1..80: mol_type = other DNA
gaggcttgtatgaaagacatgcttcggcgcgtcgttaggcaagtaaagcgtgaaaaacgccctccgcccttacctgtacc

SEQ ID NO: 16843 - DNA, 80 bp, synthetic construct
  misc_feature 1..80: note = Synthetic: >EF065516_3-cand-0-79
  source 1..80: mol_type = other DNA
cgagttcattgagacgacggcccctaaaatcacaattgattgtgctcgttacttgtgtggtgactctagtcgctgtttgg

SEQ ID NO: 16844 - DNA, 80 bp, synthetic construct
  misc_feature 1..80: note = Synthetic: >EF065516_3-cand-150-229
  source 1..80: mol_type = other DNA
ggacgctgctgttgtgtcgcttacctctcagttggtttcagacattgtgccaactgagaatagtaattttgattcaactt

SEQ ID NO: 16845 - DNA, 80 bp, synthetic construct
  misc_feature 1..80: note = Synthetic: >EF065516_4-cand-160-239
  source 1..80: mol_type = other DNA
tcagctagtgctaccggtgctatatctgctgttagtatacataatgctgtttatgctatcagcccatgtgtttcggtacc

SEQ ID NO: 16846 - DNA, 80 bp, synthetic construct
  misc_feature 1..80: note = Synthetic: >EF065516_5-cand-120-199
  source 1..80: mol_type = other DNA
cccttataaagaaggtgaccgtgcttattactataatacttctctgtatttagttagtcaaggattctttgtacatagtt

SEQ ID NO: 16847 - DNA, 80 bp, synthetic construct
  misc_feature 1..80: note = Synthetic: >EF065516_5-cand-210-289
  source 1..80: mol_type = other DNA
gaatcagattgaaggtttatattgtcagcaaccatttggtgtggtttttggcaatacttttgagcaagaccgcattgcta

SEQ ID NO: 16848 - DNA, 80 bp, synthetic construct
  misc_feature 1..80: note = Synthetic: >EF065516_5-cand-300-379
  source 1..80: mol_type = other DNA
agcaccagatgtgtacggtcgttggattactgctactccacgctcatatactaacgttactatcttagtttgtagtaatg

SEQ ID NO: 16849 - DNA, 80 bp, synthetic construct
  misc_feature 1..80: note = Synthetic: >EF065516_5-cand-390-469
  source 1..80: mol_type = other DNA
cgctaatcctgcttttaatagatggggaccagcaggtgactatctagctaataatgcctttactgagcatgatgattctt

SEQ ID NO: 16850 - DNA, 80 bp, synthetic construct
  misc_feature 1..80: note = Synthetic: >EF065516_5-cand-480-559
  source 1..80: mol_type = other DNA
taacactatgcgtataccatataatacatcacgtattaatttggcatttcggttccaagatggtaacctactaatttatt

SEQ ID NO: 16851 - DNA, 80 bp, synthetic construct
  misc_feature 1..80: note = Synthetic: >EF065516_5-cand-570-649
  source 1..80: mol_type = other DNA
gttaccacatggtagcttagatttaagtgcgccttggcctcttaatttttacacgtctgtggcagttggtggcaatttga

SEQ ID NO: 16852 - DNA, 80 bp, synthetic construct
  misc_feature 1..80: note = Synthetic: >EF203064_2-cand-0-79
  source 1..80: mol_type = other DNA
ctaacaaagccaaatggttttgtcctactaatgttggtaggcctgttggtacaggtgttggtataggtgtgtatgcgcag

SEQ ID NO: 16853 - DNA, 80 bp, synthetic construct
  misc_feature 1..80: note = Synthetic: >EF203064_2-cand-100-179
  source 1..80: mol_type = other DNA
gactggaggatcgggtgctggtgggtatacttttagtgtatcacccaagcatgtcactaatttgacgtggtcattgtggg

SEQ ID NO: 16854 - DNA, 80 bp, synthetic construct; identical to SEQ ID NO: 16852
  misc_feature 1..80: note = Synthetic: >EF203065_2-cand-0-79
  source 1..80: mol_type = other DNA

SEQ ID NO: 16855 - DNA, 80 bp, synthetic construct; identical to SEQ ID NO: 16853
  misc_feature 1..80: note = Synthetic: >EF203065_2-cand-100-179
  source 1..80: mol_type = other DNA

SEQ ID NO: 16856 - DNA, 80 bp, synthetic construct; identical to SEQ ID NO: 16852
  misc_feature 1..80: note = Synthetic: >EF203066_2-cand-0-79
  source 1..80: mol_type = other DNA

SEQ ID NO: 16857 - DNA, 80 bp, synthetic construct; identical to SEQ ID NO: 16853
  misc_feature 1..80: note = Synthetic: >EF203066_2-cand-100-179
  source 1..80: mol_type = other DNA

SEQ ID NO: 16858 - DNA, 80 bp, synthetic construct; identical to SEQ ID NO: 16852
  misc_feature 1..80: note = Synthetic: >EF203067_2-cand-0-79
  source 1..80: mol_type = other DNA

SEQ ID NO: 16859 - DNA, 80 bp, synthetic construct; identical to SEQ ID NO: 16853
  misc_feature 1..80: note = Synthetic: >EF203067_2-cand-100-179
  source 1..80: mol_type = other DNA

SEQ ID NO: 16860 - DNA, 80 bp, synthetic construct
  misc_feature 1..80: note = Synthetic: >EF446615_1-cand-0-79
  source 1..80: mol_type = other DNA
ccagtttgcaacaagttatagattgtatatgctgggacgatggtttccacattaattttggaaatccaaaaatcctaggc

SEQ ID NO: 16861 - DNA, 80 bp, synthetic construct
  misc_feature 1..80: note = Synthetic: >EF446615_1-cand-90-169
  source 1..80: mol_type = other DNA
ttttggaagttaaaggtttagaagaattgcatggtgaaatagaaagaagtatcagtgagaaaggttgtgtagttggtcag

SEQ ID NO: 16862 - DNA, 80 bp, synthetic construct
  misc_feature 1..80: note = Synthetic: >EU022525_1-cand-0-79
  source 1..80: mol_type = other DNA
tgtcactggtaaagataatactacacttgtagacggtggtctagcaataactagtggcagtggtttattggcctttcgta

SEQ ID NO: 16863 - DNA, 80 bp, synthetic construct
  misc_feature 1..80: note = Synthetic: >EU022525_1-cand-120-199
  source 1..80: mol_type = other DNA
ttcaactcaagctgtaattgttaacgggagttttgtaggcttgtttcttcctgcatcttgtaggttagccggacaatttg

SEQ ID NO: 16864 - DNA, 80 bp, synthetic construct
  misc_feature 1..80: note = Synthetic: >EU022525_2-cand-0-79
  source 1..80: mol_type = other DNA
gggggtgaagctctagatttttatagtccagatgttatgagaccgccagatggtgcatatatacaatccggttattatga

SEQ ID NO: 16865 - DNA, 80 bp, synthetic construct
  misc_feature 1..80: note = Synthetic: >EU022525_2-cand-670-749
  source 1..80: mol_type = other DNA
tatatgatttttatgtagctcttaaaggagattctgttagttataatcaaagttgtgtagactctaactacccattcttt

SEQ ID NO: 16866 - DNA, 80 bp, synthetic construct
  misc_feature 1..80: note = Synthetic: >EU022526_1-cand-10-89
  source 1..80: mol_type = other DNA
gcaaattcttttaataaggctcttaaaggtatacagtcagcattagatactgtgtccgagggatttcatgaagtagctag

SEQ ID NO: 16867 - DNA, 80 bp, synthetic construct
  misc_feature 1..80: note = Synthetic: >EU022526_1-cand-140-219
  source 1..80: mol_type = other DNA
atacacattctgatatattaaataaacttatggctcagcttagtgttaattttggggctgtttcatcttctctgaatgag

SEQ ID NO: 16868 - DNA, 80 bp, synthetic construct
  misc_feature 1..80: note = Synthetic: >EU022526_2-cand-0-79
  source 1..80: mol_type = other DNA
ggtgaggccttagatttttatagtccagatgttatgagaccgccagatggtgcatatatacaatctggttattatgaacc

SEQ ID NO: 16869 - DNA, 80 bp, synthetic construct
  misc_feature 1..80: note = Synthetic: >EU022526_2-cand-80-159
  source 1..80: mol_type = other DNA
actttttacaggttgttttaatcaaacttatcaaaatgataccacctgtagaaatgggctccatgcggggtcaccaggta

SEQ ID NO: 16870 - DNA, 80 bp, synthetic construct
  misc_feature 1..80: note = Synthetic: >EU022526_2-cand-140-219
  source 1..80: mol_type = other DNA
ccatgcggggtcaccaggtaattttactatacagggtgactttcttaaaaattatgatgctattggcttaatgttttggt

SEQ ID NO: 16871 - DNA, 80 bp, synthetic construct
  misc_feature 1..80: note = Synthetic: >EU022526_2-cand-220-299
  source 1..80: mol_type = other DNA
ggggcctaagtatgggtaatagtacgcctctatttaacttaacatggggtgacttttttcttgcttctaggaactttaca

SEQ ID NO: 16872 - DNA, 80 bp, synthetic construct
  misc_feature 1..80: note = Synthetic: >EU022526_2-cand-300-379
  source 1..80: mol_type = other DNA
ggtttccctaaagttaaaaggattatattcattggcactggggatatttttgtgaatggtgtgctaatgggtatgtataa

SEQ ID NO: 16873 - DNA, 80 bp, synthetic construct
  misc_feature 1..80: note = Synthetic: >EU022526_2-cand-380-459
  source 1..80: mol_type = other DNA
cttaaattttacacaaaccttaacaatttggttggcgcagtgtgttggcacaatgaagattgttattttacgtaatagta

SEQ ID NO: 16874 - DNA, 80 bp, synthetic construct
  misc_feature 1..80: note = Synthetic: >EU022526_2-cand-460-539
  source 1..80: mol_type = other DNA
atgctctagttcaattttcagctggtaatgttgttgattttgaaccctgcacaggagccactactattaataagttacgt

SEQ ID NO: 16875 - DNA, 80 bp, synthetic construct
  misc_feature 1..80: note = Synthetic: >EU022526_2-cand-620-699
  source 1..80: mol_type = other DNA
tttaccttacccagatttaatagacaatactggtcaagaggtagaagacttttacgtagctcttaaaggagacgctgtta

SEQ ID NO: 16876 - DNA, 80 bp, synthetic construct
  misc_feature 1..80: note = Synthetic: >EU022526_2-cand-700-779
  source 1..80: mol_type = other DNA
gttacaatcaaagttgtgtagactctaagtactctttctttaaattaaagtgtaataatacttatagttgggattctgat

SEQ ID NO: 16877 - DNA, 80 bp, synthetic construct
  misc_feature 1..80: note = Synthetic: >EU022526_2-cand-780-859
  source 1..80: mol_type = other DNA
aagttgtgtatattagggtctgaattatatgtgccagggtataatgtttatactaatacgcaacattcatatgctggcac

SEQ ID NO: 16878 - DNA, 80 bp, synthetic construct
  misc_feature 1..80: note = Synthetic: >EU022526_2-cand-870-949
  source 1..80: mol_type = other DNA
tatccaacttgttcttccaaaggtcttagtttggcaaatatttataatagtataggtttcaatagattttgtgcaaccaa

SEQ ID NO: 16879 - DNA, 80 bp, synthetic construct
  misc_feature 1..80: note = Synthetic: >EU022526_2-cand-950-1029
  source 1..80: mol_type = other DNA
actgtttgagactcgtgatatatcatctataacccaatacacttgtgtttatgttgttagtgtagagggttatgatagtt

SEQ ID NO: 16880 - DNA, 80 bp, synthetic construct
  misc_feature 1..80: note = Synthetic: >EU022526_2-cand-1030-1109
  source 1..80: mol_type = other DNA
ataatatgggtcttaagtatcgttatgttggtataaattttgattttggcacagctatgtatagtgtgaaaagtgcccct

SEQ ID NO: 16881 - DNA, 80 bp, synthetic construct
  misc_feature 1..80: note = Synthetic: >EU022526_2-cand-1110-1189
  source 1..80: mol_type = other DNA
acacagttcatctatacagagcaatgtcataattacaatatttacaacataagaggtgttggtcaaatattaaatgtcac

SEQ ID NO: 16882 - DNA, 80 bp, synthetic construct
  misc_feature 1..80: note = Synthetic: >EU022526_2-cand-1190-1269
  source 1..80: mol_type = other DNA
tggtaaagataataccacacttgtagatggtggtttagcaataactagtggcagtggattattggcctttcgtaataatg

SEQ ID NO: 16883 - DNA, 80 bp, synthetic construct
  misc_feature 1..80: note = Synthetic: >EU022526_2-cand-1270-1349
  source 1..80: mol_type = other DNA
gaagtctttttagtgtacaaccttgccagacagtttcaactcaagctgtaattgtcaatgggagttttgtaggcttgttt

SEQ ID NO: 16884 - DNA, 80 bp, synthetic construct
  misc_feature 1..80: note = Synthetic: >EU022526_2-cand-1350-1429
  source 1..80: mol_type = other DNA
gttcctgcatcttgtggattagctagtcaatttaatttaggtaaccacacagagtatgtagacggtggttgtttgattag

SEQ ID NO: 16885 - DNA, 80 bp, synthetic construct
  misc_feature 1..80: note = Synthetic: >EU022526_2-cand-1440-1519
  source 1..80: mol_type = other DNA
actactagaaggcgtagggctactagtgctgtttatactggtgaatgcataggtttatttgcatctatgggtacatcttg

SEQ ID NO: 16886 - DNA, 80 bp, synthetic construct; identical to SEQ ID NO: 16781
  misc_feature 1..80: note = Synthetic: >EU074218_1-cand-130-209
  source 1..80: mol_type = other DNA

SEQ ID NO: 16887 - DNA, 80 bp, synthetic construct
  misc_feature 1..80: note = Synthetic: >EU095850_1-cand-310-389
  source 1..80: mol_type = other DNA
attttacaggtttccataaagttaaaagtgtcatatttattgccactggagatatcttcgtaaatggcgttttaatgggt

SEQ ID NO: 16888 - DNA, 80 bp, synthetic construct
  misc_feature 1..80: note = Synthetic: >EU111742_1-cand-0-79
  source 1..80: mol_type = other DNA
tacggcggaaaatgccacccaattggagtgggatgatccgtattataatagtactttattttcctatgtaaatataacca

SEQ ID NO: 16889 - DNA, 80 bp, synthetic construct
  misc_feature 1..80: note = Synthetic: >EU111742_1-cand-220-299
  source 1..80: mol_type = other DNA
gtggcacgttgtttatcatcattatgtgctgttataatacctaaaggtcgtgtcttttttgagaagaatgaaatgtggtg

SEQ ID NO: 16890 - DNA, 80 bp, synthetic construct
  misc_feature 1..80: note = Synthetic: >EU111742_1-cand-320-399
  source 1..80: mol_type = other DNA
accaaccaggcaactatacatttagacacgagcgttttatgagcttatcccaaaatattactgtaattggattggctggt

SEQ ID NO: 16891 - DNA, 80 bp, synthetic construct
  misc_feature 1..80: note = Synthetic: >EU111742_1-cand-410-489
  source 1..80: mol_type = other DNA
tgtttggtttgggccaaactattaatattaatagtgcatcctatgactggggtacagttatacgtgggcgtttagatgat

SEQ ID NO: 16892 - DNA, 80 bp, synthetic construct
  misc_feature 1..80: note = Synthetic: >EU111742_1-cand-500-579
  source 1..80: mol_type = other DNA
aattgcagatgacgggtgccgatctctgtaatttgactagagtggatactagctcagatgcattttatacagctggttta

SEQ ID NO: 16893 - DNA, 80 bp, synthetic construct
  misc_feature 1..80: note = Synthetic: >EU111742_1-cand-590-669
  source 1..80: mol_type = other DNA
cttcagcagcattaattgcagatggtgcttataagcccatttttactggtgtatttcatgataacgaaacacaccaggtg

SEQ ID NO: 16894 - DNA, 80 bp, synthetic construct
  misc_feature 1..80: note = Synthetic: >EU186072_1-cand-40-119
  source 1..80: mol_type = other DNA
acttttttgaacactacatatacgatgtttcagaatattgtggttgattatattgacattaacaagactatcgctgatat

SEQ ID NO: 16895 - DNA, 80 bp, synthetic construct
  misc_feature 1..80: note = Synthetic: >EU186072_2-cand-30-109
  source 1..80: mol_type = other DNA
tacagaaaaacttccaggctattagcagttctattgctgaaatttataatagattggaaaaggcggaagctgatgcccaa

SEQ ID NO: 16896 - DNA, 80 bp, synthetic construct
  misc_feature 1..80: note = Synthetic: >EU186072_3-cand-180-259
  source 1..80: mol_type = other DNA
tgatttccagcctgcaaatagtagcgtatctcacatcccacttggcaaaactaggcattcttatttttgttttgccaatt

SEQ ID NO: 16897 - DNA, 80 bp, synthetic construct
  misc_feature 1..80: note = Synthetic: >EU186072_4-cand-0-79
  source 1..80: mol_type = other DNA
cctaccctactgtggagacggcccgaattgtggatggtataattttgtttatagtcaaaatgtgggacaaaatggtaggc

SEQ ID NO: 16898 - DNA, 80 bp, synthetic construct
  misc_feature 1..80: note = Synthetic: >EU186072_4-cand-100-179
  source 1..80: mol_type = other DNA
aatctgaacataccgaatgttcacggtgtttactttgatgtaagagaacataattctgatggtttgtgggatgcgcgtga

SEQ ID NO: 16899 - DNA, 80 bp, synthetic construct
  misc_feature 1..80: note = Synthetic: >EU186072_4-cand-310-389
  source 1..80: mol_type = other DNA
agttcataccatcaatttagtgtcaatctagaagatggtggtcaatgtgtgtttaaccagagatttgacaccgtgttgac

SEQ ID NO: 16900 - DNA, 80 bp, synthetic construct
  misc_feature 1..80: note = Synthetic: >EU186072_4-cand-400-479
  source 1..80: mol_type = other DNA
ttttatggtttccagtggactgacacatatgtcgacatctacttaggaggcactattactaaggtgtgggttaacaacga

SEQ ID NO: 16901 - DNA, 80 bp, synthetic construct
  misc_feature 1..80: note = Synthetic: >EU186072_5-cand-90-169
  source 1..80: mol_type = other DNA
aagatatcatcttagctaaggcccctgaactagcctcacttgctgatgtacactttgaaattctccaagctaacggaagt

SEQ ID NO: 16902 - DNA, 80 bp, synthetic construct
  misc_feature 1..80: note = Synthetic: >EU186072_5-cand-180-259
  source 1..80: mol_type = other DNA
ttaccagtctatgtgtccaagcaaaacagttggctctattttataaatatactagtttacaaggtttgtatacttattct

SEQ ID NO: 16903 - DNA, 80 bp, synthetic construct
  misc_feature 1..80: note = Synthetic: >EU186072_5-cand-270-349
  source 1..80: mol_type = other DNA
agttacaaaattatgactgccctttctcaccacagcattttaataattatttgcagtttgaaactttgtgttttgatgtg

SEQ ID NO: 16904 - DNA, 80 bp, synthetic construct
  misc_feature 1..80: note = Synthetic: >EU186072_5-cand-360-439
  source 1..80: mol_type = other DNA
tggcaggttgtaagtggtcgttagttcatgatgttaattggcgtacacagttcgccaccatcactgtctcttataaagat

SEQ ID NO: 16905 - DNA, 80 bp, synthetic construct
  misc_feature 1..80: note = Synthetic: >EU186072_5-cand-440-519
  source 1..80: mol_type = other DNA
ggtgctatgataacaactatgccaagggcacagctgggtttcaaagacatctctaatttagtaaaagatgaatgcactga

SEQ ID NO: 16906 - DNA, 80 bp, synthetic construct
  misc_feature 1..80: note = Synthetic: >EU186072_5-cand-520-599
  source 1..80: mol_type = other DNA
ttataacatatatggatttcaaggcacaggcattattagaagcaccacctcacgattagtggctggcctttactacacat

SEQ ID NO: 16907 - DNA, 80 bp, synthetic construct
  misc_feature 1..80: note = Synthetic: >EU186072_5-cand-610-689
  source 1..80: mol_type = other DNA
tgatcttctcgcctttaaaaatagtactactggggagattttcactgtagtgccatgtgatttaacagtgctagcagctg

SEQ ID NO: 16908 - DNA, 80 bp, synthetic construct
  misc_feature 1..80: note = Synthetic: >EU186072_5-cand-780-859
  source 1..80: mol_type = other DNA
gtaggccgacatcacactcggtaaccacctacaatatgccgcaattttattacataacaaggtggaacaatgacacctcg

SEQ ID NO: 16909 - DNA, 80 bp, synthetic construct
  misc_feature 1..80: note = Synthetic: >EU186072_5-cand-870-949
  source 1..80: mol_type = other DNA
cgtctgtcatcacttattcctcctttgctatttgtaatactggtgaaatcaaatatgttaatgtcactcatgttgaaact

SEQ ID NO: 16910 - DNA, 80 bp, synthetic construct
  misc_feature 1..80: note = Synthetic: >EU420137_1-cand-40-119
  source 1..80: mol_type = other DNA
tatgacaaatacagttgtgctgttaagagtggagactgtgttgttacacacaagtatgtgttcaatgttcctagttttgt

SEQ ID NO: 16911 - DNA, 80 bp, synthetic construct
  misc_feature 1..80: note = Synthetic: >EU420137_2-cand-30-109
  source 1..80: mol_type = other DNA
ttgctttttctagtttcagtactgctattgatattcaagctggaagttgtccctttagttataataatttaaacaattac

SEQ ID NO: 16912 - DNA, 80 bp, synthetic construct
  misc_feature 1..80: note = Synthetic: >EU420137_3-cand-0-79
  source 1..80: mol_type = other DNA
tgccaaattttctcatcggccattcaaccttcgtggttggatcgttcgatctaattcaaattacttccttgaaaccatgg

SEQ ID NO: 16913 - DNA, 80 bp, synthetic construct
  misc_feature 1..80: note = Synthetic: >EU420137_3-cand-150-229
  source 1..80: mol_type = other DNA
gcctgtgattacagaagatatgtggtatttctgtgactacttcggtgatgatggtgataaaatcactatcaatggtcaag

SEQ ID NO: 16914 - DNA, 80 bp, synthetic construct
  misc_feature 1..80: note = Synthetic: >EU420137_4-cand-0-79
  source 1..80: mol_type = other DNA
aagggttcactcgaagagtgtgtctctacctttgacacctgtacacacgacaactttactacagttgctaaggcttttaa

SEQ ID NO: 16915 - DNA, 80 bp, synthetic construct
  misc_feature 1..80: note = Synthetic: >EU420137_4-cand-110-189
  source 1..80: mol_type = other DNA
cgatgtcgttgctagtgttatcagcggttcacttgatgtaggtctttcagttctggatgtcaccacagctgtaaccaaac

SEQ ID NO: 16916 - DNA, 80 bp, synthetic construct
  misc_feature 1..80: note = Synthetic: >EU420138_1-cand-20-99
  source 1..80: mol_type = other DNA
gcaccaatgtccttgaggttgtaaccaaccccatttttgcgcatggttttgtgcagtgtaaatgtgggtctaaacattgg

SEQ ID NO: 16917 - DNA, 80 bp, synthetic construct
  misc_feature 1..80: note = Synthetic: >EU420139_1-cand-40-119
  source 1..80: mol_type = other DNA
tgtcaacattactgatgaacagctgccacaagttcagcctgagtttattgatgtcaacaagactcttgaagagttaatgt

SEQ ID NO: 16918 - DNA, 80 bp, synthetic construct
  misc_feature 1..80: note = Synthetic: >EU420139_2-cand-80-159
  source 1..80: mol_type = other DNA
aatgctgtttttgttatgtatagaaccaaagcccttgcctttgagattggtgttagttcttctgctggtggtgagcagta

SEQ ID NO: 16919 - DNA, 80 bp, synthetic construct
  misc_feature 1..80: note = Synthetic: >EU420139_2-cand-240-319
  source 1..80: mol_type = other DNA
ccactttgcagtccacttctgggaaggattgtattgtcaatgttaaagttgacaatcatatgttctatcatgcagctcat

SEQ ID NO: 16920 - DNA, 80 bp, synthetic construct
  misc_feature 1..80: note = Synthetic: >EU420139_2-cand-320-399
  source 1..80: mol_type = other DNA
gatatagtcggcatgtcctggtctggtgacgctgtacgtctatatacccagactgacacaaaaacttattacatccctaa

SEQ ID NO: 16921 - DNA, 80 bp, synthetic construct
  misc_feature 1..80: note = Synthetic: >EU420139_2-cand-400-479
  source 1..80: mol_type = other DNA
ttcttgggacagagtgtctattaggtgccctgataagttctcgtgttcctcacaaattgtcactaaggctattactgtca

SEQ ID NO: 16922 - DNA, 80 bp, synthetic construct
  misc_feature 1..80: note = Synthetic: >EU420139_2-cand-490-569
  source 1..80: mol_type = other DNA
ttttgctaatggtaccattgacaagtatgccatttgtgacaattgtaatggatatccggctcacatctttcctgtatctg

SEQ ID NO: 16923 - DNA, 80 bp, synthetic construct
  misc_feature 1..80: note = Synthetic: >EU420139_2-cand-570-649
  source 1..80: mol_type = other DNA
aaggtggacttattccagctgattttaatttttctaactggttcctgcttactaatagttctactattgttgatggccgc

SEQ ID NO: 16924 - DNA, 80 bp, synthetic construct
  misc_feature 1..80: note = Synthetic: >EU420139_2-cand-650-729
  source 1..80: mol_type = other DNA
attgtttcagaacagcctgtgctacttatgtgtctttgggctgtacctggactgatgtcaactaatagctttgtctattt

SEQ ID NO: 16925 - DNA, 80 bp, synthetic construct
  misc_feature 1..80: note = Synthetic: >EU420139_2-cand-730-809
  source 1..80: mol_type = other DNA
caatggtacagcccctaataagcaatgcaatggctatgctacggatagtgcttttgaggcattacggttttcccttaatt

SEQ ID NO: 16926 - DNA, 80 bp, synthetic construct
  misc_feature 1..80: note = Synthetic: >EU420139_2-cand-820-899
  source 1..80: mol_type = other DNA
aagagtctttgctggcagcggcagtgttgtactacttgtgtctggtttgcagtacaagtttagttgcactaataattctg

SEQ ID NO: 16927 - DNA, 80 bp, synthetic construct
  misc_feature 1..80: note = Synthetic: >EU420139_2-cand-900-979
  source 1..80: mol_type = other DNA
aggctgtgatcgattccggaattccttttggtaatgttgttgagccgttttattgttttgtctctattaatggcacttct

SEQ ID NO: 16928 - DNA, 80 bp, synthetic construct
  misc_feature 1..80: note = Synthetic: >EU420139_2-cand-990-1069
  source 1..80: mol_type = other DNA
gcatgctccctgctgttttacgtgaaattgttatcactcgttatggcagtatttatctcaatggtttctccatttttcaa

SEQ ID NO: 16929 - DNA, 80 bp, synthetic construct
  misc_feature 1..80: note = Synthetic: >EU420139_2-cand-1080-1159
  source 1..80: mol_type = other DNA
ttcagggtgttttgttcaatgtaactaatagaggtgcaactgatctttggaccgttgcactctctaactttacggaagtc

SEQ ID NO: 16930 - DNA, 80 bp, synthetic construct
  misc_feature 1..80: note = Synthetic: >EU420139_2-cand-1160-1239
  source 1..80: mol_type = other DNA
cttgctgaagttcaaagtactgccattaaagctctgctttattgtgatgacccattgtctcagcttaagtgtcaacaatt

SEQ ID NO: 16931 - DNA, 80 bp, synthetic construct
  misc_feature 1..80: note = Synthetic: >EU420139_2-cand-1240-1319
  source 1..80: mol_type = other DNA
gcaattttcgctgcctgatgggttttatgcaactgcctcactttttcaacatgagttgccacgtacttttgtcactttac

SEQ ID NO: 16932 - DNA, 80 bp, synthetic construct
  misc_feature 1..80: note = Synthetic: >EU420139_2-cand-1320-1399
  source 1..80: mol_type = other DNA
cacgccattttacgcattcttggattaacctgcgtattaaatggaagaatggtgtttgttacaattgtccacctgcttct

SEQ ID NO: 16933 - DNA, 80 bp, synthetic construct
  misc_feature 1..80: note = Synthetic: >EU420139_2-cand-1400-1479
  source 1..80: mol_type = other DNA
tcttggattgattttgtaacattcaattctaatggcaccgagaatgttcttcctgaacgcactttatgcgttaacaccac

SEQ ID NO: 16934 - DNA, 80 bp, synthetic construct
  misc_feature 1..80: note = Synthetic: >EU420139_2-cand-1480-1559
  source 1..80: mol_type = other DNA
tcagtttactaccaatttgactcttattgaggaggcttttagttattccactcctgttgttgttcgtgctgatgattgtc

SEQ ID NO: 16935 - DNA, 80 bp, synthetic construct
  misc_feature 1..80: note = Synthetic: >EU420139_2-cand-1570-1649
  source 1..80: mol_type = other DNA
ccagtccttgaacaattacctaacttttggttccatttgtttttctttgaatggcaccattggtaagggttgcacacttg

SEQ ID NO: 16936 - DNA, 80 bp, synthetic construct
  misc_feature 1..80: note = Synthetic: >EU420139_2-cand-1650-1729
  source 1..80: mol_type = other DNA
gaatatataaacgagcctcgtctcagtacattcctatttggaatgtttgggtggcttacactagtggtgataatatcctc

SEQ ID NO: 16937 - DNA, 80 bp, synthetic construct
  misc_feature 1..80: note = Synthetic: >EU420139_2-cand-1730-1809
  source 1..80: mol_type = other DNA
ggtgtcagagagcccaatgttggtgttagagatcagagtgtagtgcaccagaatgtttgtacatcatatacaatttttgg

SEQ ID NO: 16938 - DNA, 80 bp, synthetic construct
  misc_feature 1..80: note = Synthetic: >EU420139_2-cand-1810-1889
  source 1..80: mol_type = other DNA
gcattcaggtcgcggtattatcagacctgctaatatttcatatatagcaggtgtgtattatactgctgcttctggtcaac

SEQ ID NO: 16939 - DNA, 80 bp, synthetic construct
  misc_feature 1..80: note = Synthetic: >EU420139_2-cand-1890-1969
  source 1..80: mol_type = other DNA
tattgggctttaagaataccaccactggtgaagtgttttctgttacaccatgtaacccatcacagcaggctgttgttgtg

SEQ ID NO: 16940 - DNA, 80 bp, synthetic construct
  misc_feature 1..80: note = Synthetic: >EU420139_2-cand-1970-2049
  source 1..80: mol_type = other DNA
aaggatcgtcttgttggtgttatgtcatctactagcactgtttcgattccgtttaataatacgattccaactcctagttt

SEQ ID NO: 16941 - DNA, 80 bp, synthetic construct
  misc_feature 1..80: note = Synthetic: >EU420139_2-cand-2060-2139
  source 1..80: mol_type = other DNA
agtaatgccactagtagttgtgatgatccatctgttgtttattcatctattggtatttgtgatgatggcggtattacttt

SEQ ID NO: 16942 - DNA, 80 bp, synthetic construct
  misc_feature 1..80: note = Synthetic: >EU420139_2-cand-2150-2229
  source 1..80: mol_type = other DNA
actagggttcgtggtgaaccagatcctgctatttcaatgggtaatatttctgttccatcaaatttcactgtttccattca

SEQ ID NO: 16943 - DNA, 80 bp, synthetic construct
  misc_feature 1..80: note = Synthetic: >FJ376619_1-cand-40-119
  source 1..80: mol_type = other DNA
tcaacaactcaaattctaaattttcaggcaccgttcattgttgtaagacttattttacacatgatggtgttgtatctaat

SEQ ID NO: 16944 - DNA, 80 bp, synthetic construct
  misc_feature 1..80: note = Synthetic: >FJ376619_10-cand-0-79
  source 1..80: mol_type = other DNA
ttatagaagaggatgaatattcttgtgaggatgatggtgccgatgaaggagtcataccacagtgttgggatgttcccaat

SEQ ID NO: 16945 - DNA, 80 bp, synthetic construct
  misc_feature 1..80: note = Synthetic: >FJ376619_10-cand-180-259
  source 1..80: mol_type = other DNA
tagtggaaaatacccaacaaactactgacgatgctcaggagactgaattgtctactgagactagtgagcatttgttggtt

SEQ ID NO: 16946 - DNA, 80 bp, synthetic construct
  misc_feature 1..80: note = Synthetic: >FJ376619_10-cand-530-609
  source 1..80: mol_type = other DNA
ggtgaagaggacccattgccggaaactattgttaatcaaccatttatagtagacaataatctaccagtatgtgcaatcaa

SEQ ID NO: 16947 - DNA, 80 bp, synthetic construct
  misc_feature 1..80: note = Synthetic: >FJ376619_10-cand-580-659
  source 1..80: mol_type = other DNA
agacaataatctaccagtatgtgcaatcaaggaacctagttctactaaggttgagttggttgttggtgatttggctacta

SEQ ID NO: 16948 - DNA, 80 bp, synthetic construct
  misc_feature 1..80: note = Synthetic: >FJ376619_11-cand-0-79
  source 1..80: mol_type = other DNA
ttttatacatcttgcagcggcttccgttgcagatcgtattttagattttctgacctttcctaatggtcataaatatttat

SEQ ID NO: 16949 - DNA, 80 bp, synthetic construct
  misc_feature 1..80: note = Synthetic: >FJ376619_11-cand-90-169
  source 1..80: mol_type = other DNA
aggtgaccttggacagttaaagtctagggtcaactctaactatttaagagatactcgtttgacatctcttaaacatggtt

SEQ ID NO: 16950 - DNA, 80 bp, synthetic construct
  misc_feature 1..80: note = Synthetic: >FJ376619_11-cand-180-259
  source 1..80: mol_type = other DNA
agactttcacatcttctcaccactttctaactccactatccctatttcaggactactgaggagttatcaaccattgtatt

SEQ ID NO: 16951 - DNA, 80 bp, synthetic construct
  misc_feature 1..80: note = Synthetic: >FJ376619_11-cand-270-349
  source 1..80: mol_type = other DNA
tgtccaaataacaaacacaacactttctatgtttttagagccttcaacaacatttgatactgcaggttgtactggttcta

SEQ ID NO: 16952 - DNA, 80 bp, synthetic construct
  misc_feature 1..80: note = Synthetic: >FJ376619_11-cand-360-439
  source 1..80: mol_type = other DNA
tcatgatgcactccgcttaatcctcgatttaaatgaggaatcaagtgcatctattaatattaccactaccaaaaacattt

SEQ ID NO: 16953 - DNA, 80 bp, synthetic construct
  misc_feature 1..80: note = Synthetic: >FJ376619_11-cand-630-709
  source 1..80: mol_type = other DNA
tctaccagacactgttaaacaagttagacttatacaatccagtataccgtctaactatacgttctttgctttagcaaatt

SEQ ID NO: 16954 - DNA, 80 bp, synthetic construct
  misc_feature 1..80: note = Synthetic: >FJ376619_11-cand-720-799
  source 1..80: mol_type = other DNA
tcttattactttatctaacacgactattactaatgttacctattgtgataggtctactttggacatgttagcgtgtcaga

SEQ ID NO: 16955 - DNA, 80 bp, synthetic construct
  misc_feature 1..80: note = Synthetic: >FJ376619_12-cand-0-79
  source 1..80: mol_type = other DNA
tttgggtaattataatctggtcacctcgaaagtaattcctggtgtccaggttttaaaccccaaaatatcacttactgagt

SEQ ID NO: 16956 - DNA, 80 bp, synthetic construct
  misc_feature 1..80: note = Synthetic: >FJ376619_12-cand-80-159
  source 1..80: mol_type = other DNA
ttgagcagctgtttggagcacaacctgtgttacgtgcattgcgtaaccttgttgttgaaacccgcaatgctgcgtggaat

SEQ ID NO: 16957 - DNA, 80 bp, synthetic construct
  misc_feature 1..80: note = Synthetic: >FJ376619_12-cand-160-239
  source 1..80: mol_type = other DNA
ggctccaagcaggattttgctgccaaagctcaaagtcttacctttactgatcacgttttgagggcaatgatcaaatattg

SEQ ID NO: 16958 - DNA, 80 bp, synthetic construct
  misc_feature 1..80: note = Synthetic: >FJ376619_12-cand-240-319
  source 1..80: mol_type = other DNA
ccctccgcgtgtttctgcacttgcatctttggctctgttttacagaattgtgaaaatagatgccaaagatctttgtgatg

SEQ ID NO: 16959 - DNA, 80 bp, synthetic construct
  misc_feature 1..80: note = Synthetic: >FJ376619_12-cand-890-969
  source 1..80: mol_type = other DNA
ttgacattgctgatcaaacaacctatgatgttgccccgaatgtgactgtcaccataggcacttctaaacctggcgacata

SEQ ID NO: 16960 - DNA, 80 bp, synthetic construct
  misc_feature 1..80: note = Synthetic: >FJ376619_12-cand-1050-1129
  source 1..80: mol_type = other DNA
atcatgggccgtagttgaacagaagtttcgtagacttcgtgttcgagcggctgatgctttgtatgattttattagttttt

SEQ ID NO: 16961 - DNA, 80 bp, synthetic construct
  misc_feature 1..80: note = Synthetic: >FJ376619_6-cand-0-79
  source 1..80: mol_type = other DNA
ggtagtttgaaaacagctaaggaattagctgtagtgctttcaatggatttaaaaagaactatttttattattgatcagtc

SEQ ID NO: 16962 - DNA, 80 bp, synthetic construct
  misc_feature 1..80: note = Synthetic: >FJ376619_6-cand-120-199
  source 1..80: mol_type = other DNA
cgtatggagaaatatttcacttttcagaagataacacctactggtgatatctttactgatgttaaaactgctactaatgg

SEQ ID NO: 16963 - DNA, 80 bp, synthetic construct
  misc_feature 1..80: note = Synthetic: >FJ376619_8-cand-0-79
  source 1..80: mol_type = other DNA
agtgttgtagtggttagcagtaagaaagcacagaaccatgaagtcttagacaatccaaattgtttggatttgctagatgt

SEQ ID NO: 16964 - DNA, 80 bp, synthetic construct
  misc_feature 1..80: note = Synthetic: >FJ376619_8-cand-90-169
  source 1..80: mol_type = other DNA
aaacccaaatatgtcatggttaaatcatgggatgttgtgggtaaaccgctttttaagactggtaaagttgtcttacttag

SEQ ID NO: 16965 - DNA, 80 bp, synthetic construct
  misc_feature 1..80: note = Synthetic: >FJ376619_8-cand-480-559
  source 1..80: mol_type = other DNA
ttttgtgcaggagatttaacttgccttgcatgttttgatggtcaagattctttacatttgtataagcatttacgtgtaga

SEQ ID NO: 16966 - DNA, 80 bp, synthetic construct
  misc_feature 1..80: note = Synthetic: >FJ376619_9-cand-0-79
  source 1..80: mol_type = other DNA
gtatacttaatactattattcaattaactttgaatagaagtggtgctctgattatgggtaaaccagactttgagtgtgat

SEQ ID NO: 16967 - DNA, 80 bp, synthetic construct
  misc_feature 1..80: note = Synthetic: >FJ376619_9-cand-90-169
  source 1..80: mol_type = other DNA
aaatggtttataatcaagcacctataacattgcaatctggtgtagtaaagagagcttctatgtggtttttccactttctc

SEQ ID NO: 16968 - DNA, 80 bp, synthetic construct
  misc_feature 1..80: note = Synthetic: >FJ376619_9-cand-180-259
  source 1..80: mol_type = other DNA
ttttgtttgtgctagccatgttgcatgttttaccagtcgacttatatccaattggtttgccagttgtggtgagtcttgca

SEQ ID NO: 16969 - DNA, 80 bp, synthetic construct; identical to SEQ ID NO: 16943
  misc_feature 1..80: note = Synthetic: >FJ376620_1-cand-40-119
  source 1..80: mol_type = other DNA

SEQ ID NO: 16970 - DNA, 80 bp, synthetic construct
  misc_feature 1..80: note = Synthetic: >FJ376620_10-cand-0-79
  source 1..80: mol_type = other DNA
tcttatacatcttgcagcggcttccgttgcagatcgtattttagactttttgacttttcctaatggtcataaatatttat

SEQ ID NO: 16971 - DNA, 80 bp, synthetic construct
  misc_feature 1..80: note = Synthetic: >FJ376620_10-cand-190-269
  source 1..80: mol_type = other DNA
atcttctcaccgctttctaactccactatacccatttcaggattgttgaggagttatcaaccattgtatttggcttgtta

SEQ ID NO: 16972 - DNA, 80 bp, synthetic construct
  misc_feature 1..80: note = Synthetic: >FJ376620_10-cand-280-359
  source 1..80: mol_type = other DNA
accaatacaactttatctatgtttttagagccctcaacaactgaaactgctggttgttcaggaactaaagacaaaactca

SEQ ID NO: 16973 - DNA, 80 bp, synthetic construct
  misc_feature 1..80: note = Synthetic: >FJ376620_10-cand-370-449
  source 1..80: mol_type = other DNA
cgcttaattctcgatttaaatgaggaggcaagagcatctattaatattaccactacaaaaaacattttatatgtttttgt

SEQ ID NO: 16974 - DNA, 80 bp, synthetic construct
  misc_feature 1..80: note = Synthetic: >FJ376620_10-cand-640-719
  source 1..80: mol_type = other DNA
gttaaacaagttagacttatacaatctagtataccgtctaactatactttctttgctttagcaaatttaactgatactct

SEQ ID NO: 16975 - DNA, 80 bp, synthetic construct
  misc_feature 1..80: note = Synthetic: >FJ376620_10-cand-730-809
  source 1..80: mol_type = other DNA
tctaacacgactattaccaatgttacctattgtgataggtctactttggatatgttagcgtgtcagatttccaaacatta

SEQ ID NO: 16976 - DNA, 80 bp, synthetic construct
  misc_feature 1..80: note = Synthetic: >FJ376620_10-cand-820-899
  source 1..80: mol_type = other DNA
gggttttattctgatccacaaacaacatcattagcattaccacgtactattgttacattacctaaagttgctgagcttga

SEQ ID NO: 16977 - DNA, 80 bp, synthetic construct
  misc_feature 1..80: note = Synthetic: >FJ376620_11-cand-0-79
  source 1..80: mol_type = other DNA
ttaaaactgctactaatggacaagcaagtgatacagctattaatgcagccatacttgctgttcaaaaaggattggatttt

SEQ ID NO: 16978 - DNA, 80 bp, synthetic construct
  misc_feature 1..80: note = Synthetic: >FJ376620_11-cand-90-169
  source 1..80: mol_type = other DNA
atccaaaccatatattaccgcattatgcttttgactttaacaccctttcagcagaagaccagtctgttctcttagaagct

SEQ ID NO: 16979 - DNA, 80 bp, synthetic construct
  misc_feature 1..80: note = Synthetic: >FJ376620_11-cand-150-229
  source 1..80: mol_type = other DNA
agtctgttctcttagaagctggttgtgctaaaggtaatcttaaaggcactaatgtaggtgttgttttggcagctaacctt

SEQ ID NO: 16980 - DNA, 80 bp, synthetic construct
  misc_feature 1..80: note = Synthetic: >FJ376620_11-cand-230-309
  source 1..80: mol_type = other DNA
gttatgcgtcttagtcaatcagctatacgcataattgcaaatgctgcatctcgtaatggtgttacttgtgctgtgacacc

SEQ ID NO: 16981 - DNA, 80 bp, synthetic construct
  misc_feature 1..80: note = Synthetic: >FJ376620_11-cand-320-399
  source 1..80: mol_type = other DNA
acactgcgtggtaatattgctactcaaccttttcagcgtgttaaggctggtagtgataataaacacagtgttgttaaatt

SEQ ID NO: 16982 - DNA, 80 bp, synthetic construct
  misc_feature 1..80: note = Synthetic: >FJ376620_11-cand-550-629
  source 1..80: mol_type = other DNA
ctcaacagacacttgtttttcaaataaatttgtgtcttttgatggttacatacaggcagagtacaccaatgatcccgctt

SEQ ID NO: 16983 - DNA, 80 bp, synthetic construct
  misc_feature 1..80: note = Synthetic: >FJ376620_11-cand-640-719
  source 1..80: mol_type = other DNA
agttggtgttgcagatgttactactaaatccatacctggtattccagctggtgtcctacatcgtgatgggggtattcttc

SEQ ID NO: 16984 - DNA, 80 bp, synthetic construct
  misc_feature 1..80: note = Synthetic: >FJ376620_11-cand-730-809
  source 1..80: mol_type = other DNA
acaagctctctacgatagacttcagcgccagtcaatggttcaggaagctcttaatcttaaagtgagaccactttttaatt

SEQ ID NO: 16985 - DNA, 80 bp, synthetic construct
  misc_feature 1..80: note = Synthetic: >FJ376620_11-cand-820-899
  source 1..80: mol_type = other DNA
aacaattgttggttatacacgcactgaagtagtcgttggcacttcatacttgcggtcaccagcactttttaatgctaaat

SEQ ID NO: 16986 - DNA, 80 bp, synthetic construct; identical to SEQ ID NO: 16966
  misc_feature 1..80: note = Synthetic: >FJ376620_12-cand-0-79
  source 1..80: mol_type = other DNA

SEQ ID NO: 16987 - DNA, 80 bp, synthetic construct; identical to SEQ ID NO: 16967
  misc_feature 1..80: note = Synthetic: >FJ376620_12-cand-90-169
  source 1..80: mol_type = other DNA

SEQ ID NO: 16988 - DNA, 80 bp, synthetic construct
  misc_feature 1..80: note = Synthetic: >FJ376620_12-cand-570-649
  source 1..80: mol_type = other DNA
acaggttaatgactcaagtttggactgaaagacttttgtttactgcattttcactcttaacctcccatccattgttggca

SEQ ID NO: 16989 - DNA, 80 bp, synthetic construct
  misc_feature 1..80: note = Synthetic: >FJ376620_12-cand-660-739
  source 1..80: mol_type = other DNA
ggtatgtagcaggcaaatttacagttccacttattttgccagaccttgctattcgcataactatctatgtttgtataggt

SEQ ID NO: 16990 - DNA, 80 bp, synthetic construct
  misc_feature 1..80: note = Synthetic: >FJ376620_12-cand-750-829
  source 1..80: mol_type = other DNA
gtatgaggtttggtctactgtggattttaaataaattcacaactgtgcctatgggaacatataattatatggtttccatt

SEQ ID NO: 16991 - DNA, 80 bp, synthetic construct
  misc_feature 1..80: note = Synthetic: >FJ376620_12-cand-840-919
  source 1..80: mol_type = other DNA
aatacatgatggcaattaaaatgagtcctccacgtaatgtgtttgaggttataattgccaacatcagacttattggtttg

SEQ ID NO: 16992 - DNA, 80 bp, synthetic construct
  misc_feature 1..80: note = Synthetic: >FJ376620_12-cand-900-979
  source 1..80: mol_type = other DNA
acatcagacttattggtttgggtggtgtgcgcaatattgctgtatcaaccgtccaaaacaaactacttgatgctaaagca

SEQ ID NO: 16993 - DNA, 80 bp, synthetic construct; identical to SEQ ID NO: 16955
  misc_feature 1..80: note = Synthetic: >FJ376620_13-cand-0-79
  source 1..80: mol_type = other DNA

SEQ ID NO: 16994 - DNA, 80 bp, synthetic construct; identical to SEQ ID NO: 16956
  misc_feature 1..80: note = Synthetic: >FJ376620_13-cand-80-159
  source 1..80: mol_type = other DNA

SEQ ID NO: 16995 - DNA, 80 bp, synthetic construct; identical to SEQ ID NO: 16957
  misc_feature 1..80: note = Synthetic: >FJ376620_13-cand-160-239
  source 1..80: mol_type = other DNA

SEQ ID NO: 16996 - DNA, 80 bp, synthetic construct; identical to SEQ ID NO: 16958
  misc_feature 1..80: note = Synthetic: >FJ376620_13-cand-240-319
  source 1..80: mol_type = other DNA

SEQ ID NO: 16997 - DNA, 80 bp, synthetic construct
  misc_feature 1..80: note = Synthetic: >FJ376620_13-cand-890-969
  source 1..80: mol_type = other DNA
ttgacattgctgatcaaacaacttacgatgttgcaccgaatgtgaccgttactataggcacttctaaaccgggcgacata

SEQ ID NO: 16998 - DNA, 80 bp, synthetic construct
  misc_feature 1..80: note = Synthetic: >FJ376620_13-cand-1050-1129
  source 1..80: mol_type = other DNA
atcatgggccgtagttgagcagaagtttcgtagacttcatgtgcgagcggctgatgctttgtatgactttattagttttc

SEQ ID NO: 16999 - DNA, 80 bp, synthetic construct
  misc_feature 1..80: note = Synthetic: >FJ376620_4-cand-20-99
  source 1..80: mol_type = other DNA
aatgcaactgcagaggatttaccaaatattataccagactatgttgatgttaatcaaacggtcagtgatattattaattc

SEQ ID NO: 17000 - DNA, 80 bp, synthetic construct
  misc_feature 1..80: note = Synthetic: >FJ376620_5-cand-20-99
  source 1..80: mol_type = other DNA
tatacacttgcaattgctatagttaatgtttgtggcattgtccttatttataagtacactgccatatcctttgtgtatta

SEQ ID NO: 17001 - DNA, 80 bp, synthetic construct; identical to SEQ ID NO: 16944
  misc_feature 1..80: note = Synthetic: >FJ376620_8-cand-0-79
  source 1..80: mol_type = other DNA

SEQ ID NO: 17002 - DNA, 80 bp, synthetic construct
  misc_feature 1..80: note = Synthetic: >FJ376620_8-cand-160-239
  source 1..80: mol_type = other DNA
taatgtagatgcttcttcattagtggatgatacccaacaaactaacgctcaggagactgaattgtctactgagaatagtg

SEQ ID NO: 17003 - DNA, 80 bp, synthetic construct
  misc_feature 1..80: note = Synthetic: >FJ376620_8-cand-520-599
  source 1..80: mol_type = other DNA
aaatggtgaagaagacccattgctggaaactattgttaaccaaccatttatagtagacaataatctaccagcatgtgcaa

SEQ ID NO: 17004 - DNA, 80 bp, synthetic construct
  misc_feature 1..80: note = Synthetic: >FJ376620_8-cand-570-649
  source 1..80: mol_type = other DNA
tagtagacaataatctaccagcatgtgcaatcaaggaacctagttctactaaggttgagttggttgttggtgatttgtct

SEQ ID NO: 17005 - DNA, 80 bp, synthetic construct
  misc_feature 1..80: note = Synthetic: >FJ376620_9-cand-0-79
  source 1..80: mol_type = other DNA
agtgttgtagtggttagcagtaagaaaacacagaaccatgaagtcttagagaatccaaattgtttggatttgctagatgt

SEQ ID NO: 17006 - DNA, 80 bp, synthetic construct; identical to SEQ ID NO: 16964
  misc_feature 1..80: note = Synthetic: >FJ376620_9-cand-90-169
  source 1..80: mol_type = other DNA

SEQ ID NO: 17007 - DNA, 80 bp, synthetic construct
  misc_feature 1..80: note = Synthetic: >FJ376620_9-cand-270-349
  source 1..80: mol_type = other DNA
cgtgttttaccatcgtctaacacattaattcgcaccatcaaaggtttgttctattcgtttagaactatactttttgcatg

SEQ ID NO: 17008 - DNA, 80 bp, synthetic construct
  misc_feature 1..80: note = Synthetic: >FJ376620_9-cand-320-399
  source 1..80: mol_type = other DNA
ctattcgtttagaactatactttttgcatgcgccccatttttgctattgccagcagttgctagtatattagcatctggtt

SEQ ID NO: 17009 - DNA, 80 bp, synthetic construct
  misc_feature 1..80: note = Synthetic: >FJ376620_9-cand-500-579
  source 1..80: mol_type = other DNA
ttgcctcgcatgttttgatggtcaagattctttacatttgtacaagcatttacgtgtagatcagagaacctatggttcta

SEQ ID NO: 17010 - DNA, 80 bp, synthetic construct
  misc_feature 1..80: note = Synthetic: >FJ376620_9-cand-680-759
  source 1..80: mol_type = other DNA
atttacaattccattttatggtgttgtatttgtagactaccagacaacccttgtagttgtcttttcagtctactacttat

SEQ ID NO: 17011 - DNA, 80 bp, synthetic construct
  misc_feature 1..80: note = Synthetic: >FJ376621_1-cand-0-79
  source 1..80: mol_type = other DNA
ttcaacatgatggcaagtggttaatttcaccccgcagattgtttcaaccaagaccggccactgttgctgactttgtgcaa

SEQ ID NO: 17012 - DNA, 80 bp, synthetic construct
  misc_feature 1..80: note = Synthetic: >FJ376621_1-cand-90-169
  source 1..80: mol_type = other DNA
gtgaggttactttctacaatacaacctatgatgagcttccacaattaatccctgattatgtggatgttaaccagacggtt

SEQ ID NO: 17013 - DNA, 80 bp, synthetic construct
  misc_feature 1..80: note = Synthetic: >FJ376621_10-cand-120-199
  source 1..80: mol_type = other DNA
gtactgtagttaccttaagatgtgccaccataagtgggccactgtgcgcactaatggtatattacatcttaaacagaagg

SEQ ID NO: 17014 - DNA, 80 bp, synthetic construct
  misc_feature 1..80: note = Synthetic: >FJ376621_10-cand-210-289
  source 1..80: mol_type = other DNA
ctttattagtgcagctattaacctatttcaggttacacattataaattacgtcctgttatagatgaactgtatcaggagt

SEQ ID NO: 17015 - DNA, 80 bp, synthetic construct
  misc_feature 1..80: note = Synthetic: >FJ376621_10-cand-300-379
  source 1..80: mol_type = other DNA
taaccctaacagattagttgcatggatctatgcatctattaatcaaaatattggagagatgggttgtcctcaacaagtga

SEQ ID NO: 17016 - DNA, 80 bp, synthetic construct
  misc_feature 1..80: note = Synthetic: >FJ376621_10-cand-390-469
  source 1..80: mol_type = other DNA
ggtctccaatgctaattcaaaattttttggcactgttcattgttgtaagacttattttacacacgatggtgttattgcta

SEQ ID NO: 17017 - DNA, 80 bp, synthetic construct
  misc_feature 1..80: note = Synthetic: >FJ376621_10-cand-480-559
  source 1..80: mol_type = other DNA
ttttgatcttttgcaacctaaagtttattgcatgcgttgtgaaagttggacaacatttacacctgaacaagttgagggtg

SEQ ID NO: 17018 - DNA, 80 bp, synthetic construct
  misc_feature 1..80: note = Synthetic: >FJ376621_10-cand-570-649
  source 1..80: mol_type = other DNA
agggaatactattggtccagcaccaactcatgctatttgttttggtaatgcccactgttggtatacaaatgggcgtaagg

SEQ ID NO: 17019 - DNA, 80 bp, synthetic construct
  misc_feature 1..80: note = Synthetic: >FJ376621_10-cand-660-739
  source 1..80: mol_type = other DNA
ctatgacattaatgcaaatgttgtcgtagtttatcacaaatttcagatgatgaaaacacaagttgtggtttcagcaccat

SEQ ID NO: 17020 - DNA, 80 bp, synthetic construct
  misc_feature 1..80: note = Synthetic: >FJ376621_11-cand-0-79
  source 1..80: mol_type = other DNA
ttataccacagtgttgggatattcctaacattgatacattgcttgttaaattgcaaaagaataaaccagttagtgttgaa

SEQ ID NO: 17021 - DNA, 80 bp, synthetic construct
  misc_feature 1..80: note = Synthetic: >FJ376621_11-cand-100-179
  source 1..80: mol_type = other DNA
ggacactactgttacaatgaatattagcacacctgatgatgttgctattgttgaacaaataactgagtcagctgccatac

SEQ ID NO: 17022 - DNA, 80 bp, synthetic construct
  misc_feature 1..80: note = Synthetic: >FJ376621_11-cand-200-279
  source 1..80: mol_type = other DNA
gaaccaggtgaccaggttgatcaacaacctgtagaagaaataaatgtagaacaaatggtccaggaggaatctgaagtttc

SEQ ID NO: 17023 - DNA, 80 bp, synthetic construct
  misc_feature 1..80: note = Synthetic: >FJ376621_11-cand-300-379
  source 1..80: mol_type = other DNA
caactcaacctagagttattgacactctaggtgaagatgaactcttgtttattccacaatgtgattttccagaacatcgt

SEQ ID NO: 17024 - DNA, 80 bp, synthetic construct
  misc_feature 1..80: note = Synthetic: >FJ376621_11-cand-400-479
  source 1..80: mol_type = other DNA
tgaccgtaagctgaaaaatgatgttatagaacaatcacccattacttcagatgcagactcagaattaaagtctgtagatt

SEQ ID NO: 17025 - DNA, 80 bp, synthetic construct
  misc_feature 1..80: note = Synthetic: >FJ376621_11-cand-500-579
  source 1..80: mol_type = other DNA
gctgtatgtgatgatgacaccatcattacagatagcactgagaatggagaggaagaacagcttcctgcaaccattgtcaa

SEQ ID NO: 17026 - DNA, 80 bp, synthetic construct
  misc_feature 1..80: note = Synthetic: >FJ376621_11-cand-710-789
  source 1..80: mol_type = other DNA
aatccacaattaacaaatggtggaggtgctgctagagctatagcagagttggctggtccagaatatcaagctcactgtaa

SEQ ID NO: 17027 - DNA, 80 bp, synthetic construct
  misc_feature 1..80: note = Synthetic: >FJ376621_12-cand-0-79
  source 1..80: mol_type = other DNA
aaccctagcatcagctgccaggctggttgatagagtttttgatgcattaacttttccaaatgctcatcaatatcttcgag

SEQ ID NO: 17028 - DNA, 80 bp, synthetic construct
  misc_feature 1..80: note = Synthetic: >FJ376621_12-cand-90-169
  source 1..80: mol_type = other DNA
aattcaacctcgttggttgcctagtgctgaagaacctaaatcagatggcaagggacattttacccaaaatgtccatagat

SEQ ID NO: 17029 - DNA, 80 bp, synthetic construct
  misc_feature 1..80: note = Synthetic: >FJ376621_12-cand-180-259
  source 1..80: mol_type = other DNA
tactaatggttcatcacctgttgaccaaattattcgtacaacgcaacctctgcttttgcgttgtcctcaatggtttggtt

SEQ ID NO: 17030 - DNA, 80 bp, synthetic construct
  misc_feature 1..80: note = Synthetic: >FJ376621_12-cand-270-349
  source 1..80: mol_type = other DNA
tggtaattgggtgctaaaatttaattttagtgaatctaattactgtaatgatggttacaattataatggtaacaaagtag

SEQ ID NO: 17031 - DNA, 80 bp, synthetic construct
  misc_feature 1..80: note = Synthetic: >FJ376621_12-cand-360-439
  source 1..80: mol_type = other DNA
aagacttattggtgcatttttagcttcaccatctgttgattatgtgtttacattgcaaactacctctggtagcacctact

SEQ ID NO: 17032 - DNA, 80 bp, synthetic construct
  misc_feature 1..80: note = Synthetic: >FJ376621_12-cand-450-529
  source 1..80: mol_type = other DNA
cagcacatcacaacgtccagttggatttgatgcagaaatgcaacgtaattactgttatgttaagactgctaattacacgc

SEQ ID NO: 17033 - DNA, 80 bp, synthetic construct
  misc_feature 1..80: note = Synthetic: >FJ376621_12-cand-540-619
  source 1..80: mol_type = other DNA
cattcttcctgaaagagtagctgatgttactttttccagagagggcaccttttatgtcaatggctttggcatgggttcct

SEQ ID NO: 17034 - DNA, 80 bp, synthetic construct
  misc_feature 1..80: note = Synthetic: >FJ376621_12-cand-750-829
  source 1..80: mol_type = other DNA
ttgtgacaaggacctgtatgatcatcttcgctgccagcagtcatcatttagtttaactgatggattttattcaacagcta

SEQ ID NO: 17035 - DNA, 80 bp, synthetic construct
  misc_feature 1..80: note = Synthetic: >FJ376621_12-cand-840-919
  source 1..80: mol_type = other DNA
aaatcagcagaggaaaacaatttttgttactctgcctaaacacacatatacagagactatctcaatcttgcctaacattt

SEQ ID NO: 17036 - DNA, 80 bp, synthetic construct
  misc_feature 1..80: note = Synthetic: >FJ376621_2-cand-140-219
  source 1..80: mol_type = other DNA
acaccctgtgctgcatatatgaatgaggatcatactgattatcaatcattttgtgcaggtgatttgacctgtcttgtttg

SEQ ID NO: 17037 - DNA, 80 bp, synthetic construct
  misc_feature 1..80: note = Synthetic: >FJ376621_2-cand-260-339
  source 1..80: mol_type = other DNA
catgttagtcaaaaagtttatgagacttttgactatacaccttatgctttggctttagttttacttttagcgaacaccac

SEQ ID NO: 17038 - DNA, 80 bp, synthetic construct
  misc_feature 1..80: note = Synthetic: >FJ376621_3-cand-0-79
  source 1..80: mol_type = other DNA
atggtgtataatcaagctcccattacgttacagtcaggtatagttcagagaacttctatgtggctgttacatttcttatt

SEQ ID NO: 17039 - DNA, 80 bp, synthetic construct
  misc_feature 1..80: note = Synthetic: >FJ376621_3-cand-120-199
  source 1..80: mol_type = other DNA
cctactgaattgtacccactaggcttgccagtggttacagttttttcatctattattactgttactgttaagcattcagt

SEQ ID NO: 17040 - DNA, 80 bp, synthetic construct
  misc_feature 1..80: note = Synthetic: >FJ376621_4-cand-0-79
  source 1..80: mol_type = other DNA
aagactacttgaaatgctttgatgatcctgatgtttcaggtttatacaaagttttccaaactgagtcttgggcaaaagtt

SEQ ID NO: 17041 - DNA, 80 bp, synthetic construct
  misc_feature 1..80: note = Synthetic: >FJ376621_4-cand-100-179
  source 1..80: mol_type = other DNA
gcgggttaagacttctgctgttgttcaagaattcttaaaacttctaagccttattgctgagaagtttaaatcactttcaa

SEQ ID NO: 17042 - DNA, 80 bp, synthetic construct
  misc_feature 1..80: note = Synthetic: >FJ376621_4-cand-340-419
  source 1..80: mol_type = other DNA
attcctgcataaagtggcagggtttgctacttatgcttttggaactaatatgcttttgtgtacgtcacgaggtgtgtttg

SEQ ID NO: 17043 - DNA, 80 bp, synthetic construct
  misc_feature 1..80: note = Synthetic: >FJ376621_5-cand-0-79
  source 1..80: mol_type = other DNA
atccataccaaccctatatttctgagtcttttaaacttattcttgaggagattgctgaatgtggtaacactcagtcacca

SEQ ID NO: 17044 - DNA, 80 bp, synthetic construct
  misc_feature 1..80: note = Synthetic: >FJ376621_5-cand-110-189
  source 1..80: mol_type = other DNA
ttgaaaatttggaaaattcattggcaaagaggtactgactgtggtcctggccactgcattactgtctttcagaataaaga

SEQ ID NO: 17045 - DNA, 80 bp, synthetic construct
  misc_feature 1..80: note = Synthetic: >FJ376621_5-cand-210-289
  source 1..80: mol_type = other DNA
aggagcaagattttacttctcattctgttttcacaattcctcttcctgaataaatttcatgggcaccagtcaatctagtg

SEQ ID NO: 17046 - DNA, 80 bp, synthetic construct
  misc_feature 1..80: note = Synthetic: >FJ376621_5-cand-450-529
  source 1..80: mol_type = other DNA
tattcatttattacggcgtgtcagaaggctaaaatctagactttttgctgctgcacccctactaacttaagaacatgatt

SEQ ID NO: 17047 - DNA, 80 bp, synthetic construct
  misc_feature 1..80: note = Synthetic: >FJ376621_6-cand-0-79
  source 1..80: mol_type = other DNA
cctgaacaactgcttttataccctcacattgttcgatacactagtaattattactgtcgtatgggacactgttttaaaac

SEQ ID NO: 17048 - DNA, 80 bp, synthetic construct
  misc_feature 1..80: note = Synthetic: >FJ376621_6-cand-220-299
  source 1..80: mol_type = other DNA
catcaactgcagcacttttaggatcaacttgttttattctattatgtgtttttgctattttagcatttcaacgcctgttc

SEQ ID NO: 17049 - DNA, 80 bp, synthetic construct
  misc_feature 1..80: note = Synthetic: >FJ376621_6-cand-310-389
  source 1..80: mol_type = other DNA
caacttttgtgttacatactcttattatagcgggtgttaatataataggcattgcacttgtttataagttcactgctctt

SEQ ID NO: 17050 - DNA, 80 bp, synthetic construct
  misc_feature 1..80: note = Synthetic: >FJ376621_6-cand-400-479
  source 1..80: mol_type = other DNA
attatgcaatctatttgtattgcattttaacttttgttcctattaagagaaatattgctctcttttattttgctgtagtg

SEQ ID NO: 17051 - DNA, 80 bp, synthetic construct
  misc_feature 1..80: note = Synthetic: >FJ376621_6-cand-490-569
  source 1..80: mol_type = other DNA
acattagtaatatgcaattattggctattgctgttgtgtttgtttgttacttatgttacagctatgtacgtgtagtttct

SEQ ID NO: 17052 - DNA, 80 bp, synthetic construct
  misc_feature 1..80: note = Synthetic: >FJ376621_7-cand-0-79
  source 1..80: mol_type = other DNA
tttactattgatgatccaaaccatatactacctcattatgcttttgagttttcaaatttggctgttgaagaccaatctat

SEQ ID NO: 17053 - DNA, 80 bp, synthetic construct
  misc_feature 1..80: note = Synthetic: >FJ376621_7-cand-100-179
  source 1..80: mol_type = other DNA
ctaaaggtaaacttaaaggtactaatgtgggtgttatattagctgctaacttggttgagcgtcttagccaatcggctata

SEQ ID NO: 17054 - DNA, 80 bp, synthetic construct
  misc_feature 1..80: note = Synthetic: >FJ376621_7-cand-200-279
  source 1..80: mol_type = other DNA
ttctagaaatggtgttacttgttctgtaacaccatcaactatggttttgcgtggcaacatagctacacaacctttacaga

SEQ ID NO: 17055 - DNA, 80 bp, synthetic construct
  misc_feature 1..80: note = Synthetic: >FJ376621_7-cand-300-379
  source 1..80: mol_type = other DNA
gctaaacacagtattactacttttgttgtttgtttaattgctttgtatgcattggcctatggtatggcaaccttggctgt

SEQ ID NO: 17056 - DNA, 80 bp, synthetic construct
  misc_feature 1..80: note = Synthetic: >FJ376621_7-cand-510-589
  source 1..80: mol_type = other DNA
tttgatgcttatttgcaggcagattatgttaatagtcataattgtcctgttgttgtaggtgttgctgatgtagcaactaa

SEQ ID NO: 17057 - DNA, 80 bp, synthetic construct
  misc_feature 1..80: note = Synthetic: >FJ376621_8-cand-120-199
  source 1..80: mol_type = other DNA
tggttagtgaaagtcgttcggctgaatggcataattccaaacaagcttttgttgtgaaagctcaacaattggtcttttct

SEQ ID NO: 17058 - DNA, 80 bp, synthetic construct
  misc_feature 1..80: note = Synthetic: >FJ376621_8-cand-220-299
  source 1..80: mol_type = other DNA
gattcgtcattgccccgcacgtgtatctgcacttgcatctttagcactatttaacaggattgttaaaatagatgctgaag

SEQ ID NO: 17059 - DNA, 80 bp, synthetic construct
  misc_feature 1..80: note = Synthetic: >FJ376621_8-cand-320-399
  source 1..80: mol_type = other DNA
gatgttgccgctgaagtcacttatggtggctcagctggtgttgctcttgttgattgtaagaccattactctgactcacaa

SEQ ID NO: 17060 - DNA, 80 bp, synthetic construct
  misc_feature 1..80: note = Synthetic: >FJ376621_8-cand-420-499
  source 1..80: mol_type = other DNA
caaatgagtgttttggtgttccttttacttcaaccttgcttgcacaggcaaaagttactaatggtgctatggcttatgct

SEQ ID NO: 17061 - DNA, 80 bp, synthetic construct
  misc_feature 1..80: note = Synthetic: >FJ376621_8-cand-520-599
  source 1..80: mol_type = other DNA
tgcaactttgcgcatggttaatggtaaagcactgcctatagcttctaaaccacttgttgccatcattcaaaaagttccac

SEQ ID NO: 17062 - DNA, 80 bp, synthetic construct
  misc_feature 1..80: note = Synthetic: >FJ376621_9-cand-0-79
  source 1..80: mol_type = other DNA
cccctcttttattacacttatcaaacaggtactcaatacacttatgtaacaaagccagttatatcatttactgatgtttc

SEQ ID NO: 17063 - DNA, 80 bp, synthetic construct
  misc_feature 1..80: note = Synthetic: >FJ376621_9-cand-100-179
  source 1..80: mol_type = other DNA
gtgttgactacaacatttatggtgttattggttctggtatcatccaaccttctaacatctcttatttgaatggcctctac

SEQ ID NO: 17064 - DNA, 80 bp, synthetic construct
  misc_feature 1..80: note = Synthetic: >FJ376621_9-cand-200-279
  source 1..80: mol_type = other DNA
actattagcatttaaaaactccacaactttccagatttacacagttcaaccttgtgattcacctggacaagttatagttt

SEQ ID NO: 17065 - DNA, 80 bp, synthetic construct
  misc_feature 1..80: note = Synthetic: >FJ376621_9-cand-300-379
  source 1..80: mol_type = other DNA
gccattactgcctccaatcaaactattttgaattttaagagtcgcattgcaactcctacattctactatcatacaaatgc

SEQ ID NO: 17066 - DNA, 80 bp, synthetic construct
  misc_feature 1..80: note = Synthetic: >FJ376621_9-cand-520-599
  source 1..80: mol_type = other DNA
caataccactgaattttacaatttcaattcaggctgaatacttgcaaatacaagcacagcatactgttgtggactgtcaa

SEQ ID NO: 17067 - DNA, 80 bp, synthetic construct
  misc_feature 1..80: note = Synthetic: >FJ376621_9-cand-620-699
  source 1..80: mol_type = other DNA
tgcaaaatgcttgcaattacttcagcaatattctactgcctgttcaaacattgaacaatcacttactatgtctgctcgac

SEQ ID NO: 17068 - DNA, 80 bp, synthetic construct
  misc_feature 1..80: note = Synthetic: >FJ376622_1-cand-20-99
  source 1..80: mol_type = other DNA
acatcaactaacacaactttgtatgggtttcagcgggtaatacccactcctaccttttactacaccactaatgctaccaa

SEQ ID NO: 17069 - DNA, 80 bp, synthetic construct
  misc_feature 1..80: note = Synthetic: >FJ376622_10-cand-0-79
  source 1..80: mol_type = other DNA
agggaacttccacaagatgaagacaaacctaaggctgaggttttggacaatcccacgcacttagacctaatggacttgtg

SEQ ID NO: 17070 - DNA, 80 bp, synthetic construct
  misc_feature 1..80: note = Synthetic: >FJ376622_10-cand-90-169
  source 1..80: mol_type = other DNA
cccaagttcatcttggttaagtcatggtctattttgggaaaggcactatgtaaaacaggaacagttgtttttcttagtgc

SEQ ID NO: 17071 - DNA, 80 bp, synthetic construct
  misc_feature 1..80: note = Synthetic: >FJ376622_10-cand-180-259
  source 1..80: mol_type = other DNA
cttaagttttataaccacctagtagaaataggggctatagacaaaactgttaaattgtctgttggtttggcctgtaaggt

SEQ ID NO: 17072 - DNA, 80 bp, synthetic construct
  misc_feature 1..80: note = Synthetic: >FJ376622_10-cand-270-349
  source 1..80: mol_type = other DNA
tttatgccatcggcagcaactttacggaaaacatgcctgggattgttttattcaacaaagacaatcttcatggcattagc

SEQ ID NO: 17073 - DNA, 80 bp, synthetic construct
  misc_feature 1..80: note = Synthetic: >FJ376622_10-cand-320-399
  source 1..80: mol_type = other DNA
ttcaacaaagacaatcttcatggcattagctccatttttgatgttaccggctgtagcgagtatattttctactggttaca

SEQ ID NO: 17074 - DNA, 80 bp, synthetic construct
  misc_feature 1..80: note = Synthetic: >FJ376622_10-cand-410-489
  source 1..80: mol_type = other DNA
acacttatatgcacgtactggcataccatgcgtgtataatacaactatgcattatgattataatgctttctgtgctggtg

SEQ ID NO: 17075 - DNA, 80 bp, synthetic construct
  misc_feature 1..80: note = Synthetic: >FJ376622_10-cand-500-579
  source 1..80: mol_type = other DNA
tctaacatgttttaatggccaggactcattacatttgtaccagcacctgcgcgttaatcaacaacccgtaatggaagttg

SEQ ID NO: 17076 - DNA, 80 bp, synthetic construct
  misc_feature 1..80: note = Synthetic: >FJ376622_10-cand-590-669
  source 1..80: mol_type = other DNA
ttatgcgctggctttcattttattacttgcaaatgccactttagttttagcggcccttgcatttgtgtttattgtcaata

SEQ ID NO: 17077 - DNA, 80 bp, synthetic construct
  misc_feature 1..80: note = Synthetic: >FJ376622_10-cand-680-759
  source 1..80: mol_type = other DNA
cacaataccgtatattggcaccttgtatatagactatcagacatttttagttatgtcttttatagtctattatgtataca

SEQ ID NO: 17078 - DNA, 80 bp, synthetic construct
  misc_feature 1..80: note = Synthetic: >FJ376622_11-cand-0-79
  source 1..80: mol_type = other DNA
tgactagtataaaatatgacaattccgtgttagtaaatccagccaatgaagcactttccaatgggggtggtgctgctaag

SEQ ID NO: 17079 - DNA, 80 bp, synthetic construct
  misc_feature 1..80: note = Synthetic: >FJ376622_11-cand-90-169
  source 1..80: mol_type = other DNA
acatggcaggtcctaaatatcaggcttactgtgatagcatagcgcctattacaggtaatgttactacagaaccttttgat

SEQ ID NO: 17080 - DNA, 80 bp, synthetic construct
  misc_feature 1..80: note = Synthetic: >FJ376622_11-cand-190-269
  source 1..80: mol_type = other DNA
atgtattttacatgtggtgccaccacgcggttcagatcctaatgtgcaggaacttttgtaccaggcgtataagagtattc

SEQ ID NO: 17081 - DNA, 80 bp, synthetic construct
  misc_feature 1..80: note = Synthetic: >FJ376622_11-cand-280-359
  source 1..80: mol_type = other DNA
tgcgcactacgttatacctatcttaggtgctggcatctttggttgcaatcctgtgcattcgcttgatgcctttaagaaag

SEQ ID NO: 17082 - DNA, 80 bp, synthetic construct
  misc_feature 1..80: note = Synthetic: >FJ376622_11-cand-370-449
  source 1..80: mol_type = other DNA
tgacatcgggcgtgtaacccttgtcactttggacagcaatcatttgcaaatttgggatgcgattaacagaactgttgttc

SEQ ID NO: 17083 - DNA, 80 bp, synthetic construct
  misc_feature 1..80: note = Synthetic: >FJ376622_11-cand-460-539
  source 1..80: mol_type = other DNA
ggactttgaccaggtcaccactaaggcattaacacctcaaggcatacttgatgctaacctttttgatggccaagaatttg

SEQ ID NO: 17084 - DNA, 80 bp, synthetic construct
  misc_feature 1..80: note = Synthetic: >FJ376622_11-cand-560-639
  source 1..80: mol_type = other DNA
caagtttatttggaggttactgatgaaatacagcagcaggcaaaagagcttgatctcaccctgcagcagtatgtaaccta

SEQ ID NO: 17085 - DNA, 80 bp, synthetic construct
  misc_feature 1..80: note = Synthetic: >FJ376622_11-cand-650-729
  source 1..80: mol_type = other DNA
tgtcatgctaactggcccattagtcgtactaatggcgttatgcatttgaaacaacatagaaataattgttttgtaagcgc

SEQ ID NO: 17086 - DNA, 80 bp, synthetic construct
  misc_feature 1..80: note = Synthetic: >FJ376622_12-cand-0-79
  source 1..80: mol_type = other DNA
ttgcagcattggctctgtttgaccggctggttaaaatagagtatgatgaacttaagaagattgccctagatgcagctgtt

SEQ ID NO: 17087 - DNA, 80 bp, synthetic construct
  misc_feature 1..80: note = Synthetic: >FJ376622_12-cand-220-299
  source 1..80: mol_type = other DNA
tccagctaatgcggctatgcggttcttaaacttttacctttatccttcggcaacggctgttgagaaggacggtaaaatgc

SEQ ID NO: 17088 - DNA, 80 bp, synthetic construct
  misc_feature 1..80: note = Synthetic: >FJ376622_12-cand-310-389
  source 1..80: mol_type = other DNA
ctgcaagcctatccctgcaaatgctaaaggaaaaccaattcaagaggactgccacctgattccagactaccagcaacttg

SEQ ID NO: 17089 - DNA, 80 bp, synthetic construct
  misc_feature 1..80: note = Synthetic: >FJ376622_12-cand-400-479
  source 1..80: mol_type = other DNA
ggttgaaggtgttgattccattgttgatggggttctctaccttaagactagctcagtaccacccatttactatcctcgtg

SEQ ID NO: 17090 - DNA, 80 bp, synthetic construct
  misc_feature 1..80: note = Synthetic: >FJ376622_12-cand-490-569
  source 1..80: mol_type = other DNA
tgccttgcttataccacttaaaccacagggcacttcatcaaagaagcttaacgtggtttttcatactgaaccatctgatg

SEQ ID NO: 17091 - DNA, 80 bp, synthetic construct
  misc_feature 1..80: note = Synthetic: >FJ376622_12-cand-580-659
  source 1..80: mol_type = other DNA
ttttgtacaaatgcaacaatttctcagtcgcactgagcaatcctggattgaagtgactgatgcccagacctatgatgttt

SEQ ID NO: 17092 - DNA, 80 bp, synthetic construct
  misc_feature 1..80: note = Synthetic: >FJ376622_12-cand-670-749
  source 1..80: mol_type = other DNA
aactgtacgtgtgggggtgtctaaacctggagatgttgttgtgtcaactgaagaggaatacctcaattgttttaatgacc

SEQ ID NO: 17093 - DNA, 80 bp, synthetic construct
  misc_feature 1..80: note = Synthetic: >FJ376622_12-cand-750-829
  source 1..80: mol_type = other DNA
ctgacgtgaaagagctttataagctttttcgcactgagtcatgggccaaacttgaacggaaatttgcgggtctgagggtt

SEQ ID NO: 17094 - DNA, 80 bp, synthetic construct
  misc_feature 1..80: note = Synthetic: >FJ376622_12-cand-840-919
  source 1..80: mol_type = other DNA
ccgctttatccaactttataagctttttgcatgcaattgcagatcgctttaaaccattgtatgatgtcattcatgcagtt

SEQ ID NO: 17095 - DNA, 80 bp, synthetic construct
  misc_feature 1..80: note = Synthetic: >FJ376622_12-cand-930-1009
  source 1..80: mol_type = other DNA
ttcagtgcttatctttggatgctgctgcgcgcatagcgagtgttaagcttgtctatcgcgctggcaaacttatagttgac

SEQ ID NO: 17096 - DNA, 80 bp, synthetic construct
  misc_feature 1..80: note = Synthetic: >FJ376622_2-cand-0-79
  source 1..80: mol_type = other DNA
ctcaaggcagatcagttgataaatttatacctaagacacctatggagagagactttcttgaaaagtcctctgaagagttt

SEQ ID NO: 17097 - DNA, 80 bp, synthetic construct
  misc_feature 1..80: note = Synthetic: >FJ376622_2-cand-110-189
  source 1..80: mol_type = other DNA
gttgaacatataatttatggtgatgactccaaacctattattggaggaactcacacactcatttcacttgtccgaaacaa

SEQ ID NO: 17098 - DNA, 80 bp, synthetic construct
  misc_feature 1..80: note = Synthetic: >FJ376622_3-cand-0-79
  source 1..80: mol_type = other DNA
ctggctaagatttgccagacagaaaccaggtggcgctcaaattcccccttcttatgccttttattacacaggcacaggac

SEQ ID NO: 17099 - DNA, 80 bp, synthetic construct
  misc_feature 1..80: note = Synthetic: >FJ376622_3-cand-150-229
  source 1..80: mol_type = other DNA
taaaggtccaggagctgatactactattaagccacatgttgccaagcgcaacccaaataaccctaaacaccagctgctgc

SEQ ID NO: 17100 - DNA, 80 bp, synthetic construct
  misc_feature 1..80: note = Synthetic: >FJ376622_4-cand-140-219
  source 1..80: mol_type = other DNA
cagttaattacactttgcgttcgctgcgttaccgcgccacatctatttccacattttctatacagtgtttccaatttggt

SEQ ID NO: 17101 - DNA, 80 bp, synthetic construct
  misc_feature 1..80: note = Synthetic: >FJ376622_4-cand-250-329
  source 1..80: mol_type = other DNA
actaccaagtggagtgagaacttagtttttacggcagcctcgaccttcacatcacacccagttttggctggtgtgtgttg

SEQ ID NO: 17102 - DNA, 80 bp, synthetic construct
  misc_feature 1..80: note = Synthetic: >FJ376622_5-cand-150-229
  source 1..80: mol_type = other DNA
actaccaagtcttctctagtcatgatgacctacctctggcaacacaccatattcccgaccatctcactctctatgttcaa

SEQ ID NO: 17103 - DNA, 80 bp, synthetic construct
  misc_feature 1..80: note = Synthetic: >FJ376622_5-cand-270-349
  source 1..80: mol_type = other DNA
tggaggatgatgactactgtgatcagcctgccacaaacttcgatgatgaagaaggacctattcctcagcaatgggacctt

SEQ ID NO: 17104 - DNA, 80 bp, synthetic construct
  misc_feature 1..80: note = Synthetic: >FJ376622_6-cand-130-209
  source 1..80: mol_type = other DNA
caatacgtcttgttctcaagacacactcagcctggagtttctcgcctgaaagcagactactcgcaggtataatggactcc

SEQ ID NO: 17105 - DNA, 80 bp, synthetic construct
  misc_feature 1..80: note = Synthetic: >FJ376622_6-cand-230-309
  source 1..80: mol_type = other DNA
accaattgatcacatggcacctatattgactccagtactaaagcatggccgccttaaactacatggccagcaattagcaa

SEQ ID NO: 17106 - DNA, 80 bp, synthetic construct
  misc_feature 1..80: note = Synthetic: >FJ376622_6-cand-320-399
  source 1..80: mol_type = other DNA
tgtcacatcacctccgaagtctatggtggttgttactccgtcggataccttccactacactcttcggaaaacaattgaat

SEQ ID NO: 17107 - DNA, 80 bp, synthetic construct
  misc_feature 1..80: note = Synthetic: >FJ376622_6-cand-420-499
  source 1..80: mol_type = other DNA
gctgtgttaatttaccagggcgacaggtcctctaatgcagctttacacacaatcacaacttctaattccggcaacgccag

SEQ ID NO: 17108 - DNA, 80 bp, synthetic construct
  misc_feature 1..80: note = Synthetic: >FJ376622_7-cand-0-79
  source 1..80: mol_type = other DNA
ttgttcctaaatctaacatctgcaaaccgggcctccattcgagttatcggcgcggataatactacctatatgttcgtctg

SEQ ID NO: 17109 - DNA, 80 bp, synthetic construct
  misc_feature 1..80: note = Synthetic: >FJ376622_7-cand-100-179
  source 1..80: mol_type = other DNA
caacagccatggcgaactccactttctattctgctaataagcagctttattgttttacaaatgagacctacttgggacca

SEQ ID NO: 17110 - DNA, 80 bp, synthetic construct
  misc_feature 1..80: note = Synthetic: >FJ376622_7-cand-210-289
  source 1..80: mol_type = other DNA
tatcggacgggtcaattttatgttaatggttacttgttaggtacgctacccattagtgtcaaaacagttcgcattgaaac

SEQ ID NO: 17111 - DNA, 80 bp, synthetic construct
  misc_feature 1..80: note = Synthetic: >FJ376622_7-cand-320-399
  source 1..80: mol_type = other DNA
tgcccttgcgaatctcacggacactctcatcacacttgcaaatacaactattacacaagttacttattgtgaatcatcca

SEQ ID NO: 17112 - DNA, 80 bp, synthetic construct
  misc_feature 1..80: note = Synthetic: >FJ376622_8-cand-120-199
  source 1..80: mol_type = other DNA
aagcctcagaaagttaagaagccagaatctgagcaatcctccaagcccaaacagccgaggaaacctaaaaccaagaaagc

SEQ ID NO: 17113 - DNA, 80 bp, synthetic construct
  misc_feature 1..80: note = Synthetic: >FJ376622_8-cand-210-289
  source 1..80: mol_type = other DNA
gacaaagctcctgaaaaggacaactcagctgacccggatcagttagagtgggacaacgcatttgagttcaaaaactctga

SEQ ID NO: 17114 - DNA, 80 bp, synthetic construct
  misc_feature 1..80: note = Synthetic: >FJ376622_8-cand-300-379
  source 1..80: mol_type = other DNA
ccaactacaaatacaactttaccgacagcatgtcgcgtaaattttcaaaactaacctacccgctaggaggttcccatgaa

SEQ ID NO: 17115 - DNA, 80 bp, synthetic construct
  misc_feature 1..80: note = Synthetic: >FJ376622_8-cand-390-469
  source 1..80: mol_type = other DNA
cacataactgtgccaatcatatggagccatgtgacatacccaccatgacaccttatcagccttacatcgctgaatccttt

SEQ ID NO: 17116 - DNA, 80 bp, synthetic construct
  misc_feature 1..80: note = Synthetic: >FJ376622_8-cand-480-559
  source 1..80: mol_type = other DNA
ttgaggagattgctgagactggacaatcctgttcaccacatgcagtcctccactaccatgaacaaggtttaaaggtttgg

SEQ ID NO: 17117 - DNA, 80 bp, synthetic construct
  misc_feature 1..80: note = Synthetic: >FJ376622_9-cand-0-79
  source 1..80: mol_type = other DNA
ttaagactgacatgcgcgtcgataatttttatgtaattagagatggtgtgttagacactattagagcaactgacaactgc

SEQ ID NO: 17118 - DNA, 80 bp, synthetic construct
  misc_feature 1..80: note = Synthetic: >FJ376622_9-cand-100-179
  source 1..80: mol_type = other DNA
atttgactcctttcatcaggcaacgtacactaactccccggcctgtccagtggtggtaggtgttgccgatgttaaaacac

SEQ ID NO: 17119 - DNA, 80 bp, synthetic construct
  misc_feature 1..80: note = Synthetic: >FJ376622_9-cand-200-279
  source 1..80: mol_type = other DNA
gcaggtattatattgagagacaacttagtattgcacatatacgaattgtctatctatgagagagaacagcgtgcttccat

SEQ ID NO: 17120 - DNA, 80 bp, synthetic construct
  misc_feature 1..80: note = Synthetic: >FJ376622_9-cand-300-379
  source 1..80: mol_type = other DNA
tccatacgggtagcatctttaatttggataaccgcgttgttgttggctacacacagcatgaagttgttgttggtagctca

SEQ ID NO: 17121 - DNA, 80 bp, synthetic construct
  misc_feature 1..80: note = Synthetic: >FJ376622_9-cand-400-479
  source 1..80: mol_type = other DNA
gtttaatgctaaatgcacctacttacagcgtgatggcaatagaactttgtattgctatgacgccgtagatgtacctcaca

SEQ ID NO: 17122 - DNA, 80 bp, synthetic construct
  misc_feature 1..80: note = Synthetic: >FJ376622_9-cand-630-709
  source 1..80: mol_type = other DNA
tcaacactaatcctggtgtatgtgtatcatttactgatgagtttccttattcaggaaatgagatgccaggtgtttattgt

SEQ ID NO: 17123 - DNA, 80 bp, synthetic construct
  misc_feature 1..80: note = Synthetic: >FJ647223_1-cand-30-109
  source 1..80: mol_type = other DNA
tagtggtaaacatgacgttgcatatgctgaagagtgttttactgttggtaatgattattgcccatgtgctaaccccagca

SEQ ID NO: 17124 - DNA, 80 bp, synthetic construct; identical to SEQ ID NO: 16781
  misc_feature 1..80: note = Synthetic: >FJ755618_1-cand-130-209
  source 1..80: mol_type = other DNA

SEQ ID NO: 17125 - DNA, 80 bp, synthetic construct
  misc_feature 1..80: note = Synthetic: >FJ938051_1-cand-100-179
  source 1..80: mol_type = other DNA
ttaacttttccatcagttctgttgaaaattatggcttttggaccatagcctataccaattacacagatgtaatggtggat

SEQ ID NO: 17126 - DNA, 80 bp, synthetic construct
  misc_feature 1..80: note = Synthetic: >FJ938051_2-cand-150-229
  source 1..80: mol_type = other DNA
tgctggttgtaagtggtcattagtccatgatgtacgttggcgtactcagttcgccactattaccgtttcttacaaagatg

SEQ ID NO: 17127 - DNA, 80 bp, synthetic construct
  misc_feature 1..80: note = Synthetic: >FJ938051_2-cand-260-339
  source 1..80: mol_type = other DNA
agccgggttttcaagacatctcctatttagtaaaaggtgagtgcactgattacaatatatatggattgcagggcacgggc

SEQ ID NO: 17128 - DNA, 80 bp, synthetic construct
  misc_feature 1..80: note = Synthetic: >FJ938051_3-cand-120-199
  source 1..80: mol_type = other DNA
acttgaacataccgaatgtccatggtgtttactttgatgtacgagaacataattctgatggcgtgtgggatrctcgtgat

SEQ ID NO: 17129 - DNA, 80 bp, synthetic construct
  misc_feature 1..80: note = Synthetic: >FJ938051_3-cand-220-299
  source 1..80: mol_type = other DNA
tatacatggtacttcatactacagtctgcttatggttttacaggatgaagtggaggaaaatcagcctcacgtcgctgtta

SEQ ID NO: 17130 - DNA, 80 bp, synthetic construct
  misc_feature 1..80: note = Synthetic: >FJ938051_3-cand-320-399
  source 1..80: mol_type = other DNA
ggcaacataagttcatatcatcaatttagtgttaatttaggagatggaggccaatgtgtgttcaaccagagattctcatt

SEQ ID NO: 17131 - DNA, 80 bp, synthetic construct
  misc_feature 1..80: note = Synthetic: >FJ938051_3-cand-420-499
  source 1..80: mol_type = other DNA
atgatttctatggcttccagtggactgacacatatgtggacatctacttagggggtactatcactaaagtgtgggtcgac

SEQ ID NO: 17132 - DNA, 80 bp, synthetic construct
  misc_feature 1..80: note = Synthetic: >FJ938052_1-cand-40-119
  source 1..80: mol_type = other DNA
tgacttttctgaacactacatatacgaaatttcaagagattgtgattgattatattgacatcaacaagactatcgttgat

SEQ ID NO: 17133 - DNA, 80 bp, synthetic construct
  misc_feature 1..80: note = Synthetic: >FJ938052_2-cand-30-109
  source 1..80: mol_type = other DNA
aggtttgtatacttattccaatttagtagagttacaaaattatgactgccctttttcaccacaacagtttaataattatc

SEQ ID NO: 17134 - DNA, 80 bp, synthetic construct
  misc_feature 1..80: note = Synthetic: >FJ938052_3-cand-0-79
  source 1..80: mol_type = other DNA
cagcagtgattaatgacgagatagtgggagctataacagccatcaatcaaactgatctgtttgagtttgtaaatcacaca

SEQ ID NO: 17135 - DNA, 80 bp, synthetic construct
  misc_feature 1..80: note = Synthetic: >FJ938052_3-cand-50-129
  source 1..80: mol_type = other DNA
actgatctgtttgagtttgtaaatcacacaagttcaaaaagatcacgcagatcagcaccaataacaccaaccacctatac

SEQ ID NO: 17136 - DNA, 80 bp, synthetic construct
  misc_feature 1..80: note = Synthetic: >FJ938052_4-cand-0-79
  source 1..80: mol_type = other DNA
attctgggcggctacctaccatattgcggagcagaggtcaattgtgggtggtataattttctttaccaacagcatggtaa

SEQ ID NO: 17137 - DNA, 80 bp, synthetic construct
  misc_feature 1..80: note = Synthetic: >FJ938052_4-cand-60-139
  source 1..80: mol_type = other DNA
ctttaccaacagcatggtaatacaaatggtaagtattcctacataaacacgcagaacctaggcatacacaatgttcacgg

SEQ ID NO: 17138 - DNA, 80 bp, synthetic construct
  misc_feature 1..80: note = Synthetic: >FJ938052_5-cand-390-469
  source 1..80: mol_type = other DNA
tgttaacttctccatcagttcagtagagaattatggcttttggaccatagcttacaccaactatacagatgtaatggtgg

SEQ ID NO: 17139 - DNA, 80 bp, synthetic construct
  misc_feature 1..80: note = Synthetic: >FJ938053_3-cand-130-209
  source 1..80: mol_type = other DNA
acttctatggcttccaatggactgacacatatgtagacatatacttaggtggcactattactaaagtatgggttgtaaat

SEQ ID NO: 17140 - DNA, 80 bp, synthetic construct; identical to SEQ ID NO: 17139
  misc_feature 1..80: note = Synthetic: >FJ938054_3-cand-130-209
  source 1..80: mol_type = other DNA

SEQ ID NO: 17141 - DNA, 80 bp, synthetic construct
  misc_feature 1..80: note = Synthetic: >FJ938054_4-cand-410-489
  source 1..80: mol_type = other DNA
aaattttcaccgtggtgccatgtgacttaacagctcaagcagcagtgattaatgacgaaatagtgggagctataacagcc

SEQ ID NO: 17142 - DNA, 80 bp, synthetic construct
  misc_feature 1..80: note = Synthetic: >FJ938054_4-cand-500-579
  source 1..80: mol_type = other DNA
ctgatctgtttgagtttgtaaatcacacatggtcgagaagtgcacgcgggtcatcaccaagcacagttaacacctacact

SEQ ID NO: 17143 - DNA, 80 bp, synthetic construct
  misc_feature 1..80: note = Synthetic: >FJ938054_4-cand-590-669
  source 1..80: mol_type = other DNA
tttattacataacaaagtggaataatggcacatcttctaattgcacatctgtcattacctactcctcttttgcaatctgt

SEQ ID NO: 17144 - DNA, 80 bp, synthetic construct; identical to SEQ ID NO: 17133
  misc_feature 1..80: note = Synthetic: >FJ938055_2-cand-30-109
  source 1..80: mol_type = other DNA

SEQ ID NO: 17145 - DNA, 80 bp, synthetic construct
  misc_feature 1..80: note = Synthetic: >FJ938055_3-cand-120-199
  source 1..80: mol_type = other DNA
aaacctatactatgccgcaattttattacataacaaagtggaataatgacaccttgactaattgtacgtctgtcattaca

SEQ ID NO: 17146 - DNA, 80 bp, synthetic construct; identical to SEQ ID NO: 17138
  misc_feature 1..80: note = Synthetic: >FJ938055_4-cand-390-469
  source 1..80: mol_type = other DNA

SEQ ID NO: 17147 - DNA, 80 bp, synthetic construct
  misc_feature 1..80: note = Synthetic: >FJ938055_5-cand-0-79
  source 1..80: mol_type = other DNA
actgaaactatttttggtggctatctaccatattgtgctgaaggtgtcaattgtgggtggcataattttgcttcccagca

SEQ ID NO: 17148 - DNA, 80 bp, synthetic construct
  misc_feature 1..80: note = Synthetic: >FJ938055_5-cand-100-179
  source 1..80: mol_type = other DNA
agtatgcctacataaattcgcaaaacttgggtataccgaatgtccacggcgtctactttgacgtacgagaacgctattat

SEQ ID NO: 17149 - DNA, 80 bp, synthetic construct
  misc_feature 1..80: note = Synthetic: >FJ938055_5-cand-330-409
  source 1..80: mol_type = other DNA
aacataagttcttaccatcaatttagtgttaatctaggagatagtggtcagtgcgtgtttaaccggaggttctcattgga

SEQ ID NO: 17150 - DNA, 80 bp, synthetic construct
  misc_feature 1..80: note = Synthetic: >FJ938055_5-cand-430-509
  source 1..80: mol_type = other DNA
gtttctatggcttccagtggactgatacatctgtagacatatatttaggtggcactattactaaagtgtgggttgacaac

SEQ ID NO: 17151 - DNA, 80 bp, synthetic construct
  misc_feature 1..80: note = Synthetic: >FJ938056_2-cand-0-79
  source 1..80: mol_type = other DNA
aaactattttgggcggttacctaccatattgtggagagggtgttacttgtgggtggtataattttgtttaccagcagcat

SEQ ID NO: 17152 - DNA, 80 bp, synthetic construct
  misc_feature 1..80: note = Synthetic: >FJ938056_2-cand-200-279
  source 1..80: mol_type = other DNA
cgtgttggtctattgatagccattcatggcacatcacattatagtctacttatggttttacaagacgatgtggaggaaaa

SEQ ID NO: 17153 - DNA, 80 bp, synthetic construct
  misc_feature 1..80: note = Synthetic: >FJ938056_2-cand-420-499
  source 1..80: mol_type = other DNA
atgacttctacggcttccagtggaccgacacatatgtggacatttatttagggggcactattaccaaagtgtgggttgac

SEQ ID NO: 17154 - DNA, 80 bp, synthetic construct
  misc_feature 1..80: note = Synthetic: >FJ938056_3-cand-130-209
  source 1..80: mol_type = other DNA
tttgatgtaaatccagctgttgcaggttgcaagtggtcgttagtccatgacgttaaatggcgtacacagtttgcaacaat

SEQ ID NO: 17155 - DNA, 80 bp, synthetic construct
  misc_feature 1..80: note = Synthetic: >FJ938056_3-cand-330-409
  source 1..80: mol_type = other DNA
aggtacaggcatcattagaaacacgacatcaaggttggtcgctggtctctacttcacttcaactagtggtgaccttcttg

SEQ ID NO: 17156 - DNA, 80 bp, synthetic construct
  misc_feature 1..80: note = Synthetic: >FJ938056_3-cand-430-509
  source 1..80: mol_type = other DNA
ggtgaagttttcaccgtagtgccatgtgacttaacagctcaagcagcagtgattaatgatgaaatagtgggagttatagc

SEQ ID NO: 17157 - DNA, 80 bp, synthetic construct
  misc_feature 1..80: note = Synthetic: >FJ938056_3-cand-530-609
  source 1..80: mol_type = other DNA
tgtttgagtttgtaaatcatactcattcgagaaggtcacgtgggtcaacaccaagctcagtaaccgtccatactatgccc

SEQ ID NO: 17158 - DNA, 80 bp, synthetic construct
  misc_feature 1..80: note = Synthetic: >FJ938056_3-cand-630-709
  source 1..80: mol_type = other DNA
gtggaataatgacacgtcgtccaactgcacatctgtcattacctactcctcttttgcaatttgtaatactggtgaaatta

SEQ ID NO: 17159 - DNA, 80 bp, synthetic construct
  misc_feature 1..80: note = Synthetic: >FJ938057_1-cand-40-119
  source 1..80: mol_type = other DNA
tgacattcttgaacaccacttatacgacatttcaggagattgtgattgactatattgatattaacaagactatcgctgat

SEQ ID NO: 17160 - DNA, 80 bp, synthetic construct
  misc_feature 1..80: note = Synthetic: >FJ938057_4-cand-360-439
  source 1..80: mol_type = other DNA
acgtttagtggctggcctttactacacatctactagtggcgaccttcttgcctttaaaaatagtactactggtgagattt

SEQ ID NO: 17161 - DNA, 80 bp, synthetic construct
  misc_feature 1..80: note = Synthetic: >FJ938057_5-cand-0-79
  source 1..80: mol_type = other DNA
ttctgggtggttatctaccatattgtgctagtaaaagaaatgggattggtgataattgtggatggtataattttctgtac

SEQ ID NO: 17162 - DNA, 80 bp, synthetic construct
  misc_feature 1..80: note = Synthetic: >FJ938057_5-cand-100-179
  source 1..80: mol_type = other DNA
tggtaagtattcctatataaacacgcaaaatttaaayataccgaatgtccatggcgtctattttgatgtaagagaacata

SEQ ID NO: 17163 - DNA, 80 bp, synthetic construct
  misc_feature 1..80: note = Synthetic: >FJ938057_5-cand-200-279
  source 1..80: mol_type = other DNA
gctagagacagagttggtytattgatagccatacatggccaatcccactatagtctactaatggttttgcaagacgaagt

SEQ ID NO: 17164 - DNA, 80 bp, synthetic construct
  misc_feature 1..80: note = Synthetic: >FJ938057_5-cand-300-379
  source 1..80: mol_type = other DNA
tcgctgttaaaatttgtcattggcagcyaggtaacataagttcttaccataaatttgctcttaatttgggagattacggc

SEQ ID NO: 17165 - DNA, 80 bp, synthetic construct
  misc_feature 1..80: note = Synthetic: >FJ938058_4-cand-0-79
  source 1..80: mol_type = other DNA
cagctgtgattaatgatgaaatagtgggagttataacagccgttaatcaaactgatctgtttgattttgtaaatcacacg

SEQ ID NO: 17166 - DNA, 80 bp, synthetic construct
  misc_feature 1..80: note = Synthetic: >FJ938058_4-cand-50-129
  source 1..80: mol_type = other DNA
actgatctgtttgattttgtaaatcacacgattccaagaggatcacgtaggtcaacagtcgaaacagtacgaacctacac

SEQ ID NO: 17167 - DNA, 80 bp, synthetic construct
  misc_feature 1..80: note = Synthetic: >FJ938058_4-cand-190-269
  source 1..80: mol_type = other DNA
tgtcattacttactcttcctttgctatttgtaatactggcgaaattaaatatgttaatgtcactaaagttgaaattgtgg

SEQ ID NO: 17168 - DNA, 80 bp, synthetic construct; identical to SEQ ID NO: 17132
  misc_feature 1..80: note = Synthetic: >FJ938059_1-cand-40-119
  source 1..80: mol_type = other DNA

SEQ ID NO: 17169 - DNA, 80 bp, synthetic construct; identical to SEQ ID NO: 17133
  misc_feature 1..80: note = Synthetic: >FJ938059_2-cand-30-109
  source 1..80: mol_type = other DNA

SEQ ID NO: 17170 - DNA, 80 bp, synthetic construct; identical to SEQ ID NO: 17134
  misc_feature 1..80: note = Synthetic: >FJ938059_3-cand-0-79
  source 1..80: mol_type = other DNA

SEQ ID NO: 17171 - DNA, 80 bp, synthetic construct; identical to SEQ ID NO: 17135
  misc_feature 1..80: note = Synthetic: >FJ938059_3-cand-50-129
  source 1..80: mol_type = other DNA

SEQ ID NO: 17172 - DNA, 80 bp, synthetic construct; identical to SEQ ID NO: 17138
  misc_feature 1..80: note = Synthetic: >FJ938059_4-cand-390-469
  source 1..80: mol_type = other DNA

SEQ ID NO: 17173 - DNA, 80 bp, synthetic construct
  misc_feature 1..80: note = Synthetic: >FJ938059_5-cand-0-79
  source 1..80: mol_type = other DNA
actgaaactattcttggtggctatctaccatattgtgctgaaggtgtcaattgtgggtggcataattttgctttccagca

SEQ ID NO: 17174 - DNA, 80 bp, synthetic construct
  misc_feature 1..80: note = Synthetic: >FJ938059_5-cand-50-129
  source 1..80: mol_type = other DNA
ttgtgggtggcataattttgctttccagcaacatgatgccctaaatggtaagtatgcctacataaattcgcaaaacttgg

SEQ ID NO: 17175 - DNA, 80 bp, synthetic construct; identical to SEQ ID NO: 17149
  misc_feature 1..80: note = Synthetic: >FJ938059_5-cand-330-409
  source 1..80: mol_type = other DNA

SEQ ID NO: 17176 - DNA, 80 bp, synthetic construct
  misc_feature 1..80: note = Synthetic: >FJ938059_5-cand-430-509
  source 1..80: mol_type = other DNA
atttctatggcttccagtggactgatacatctgtagacatatatttaggtggcactattactaaagtgtgggtagacaac

SEQ ID NO: 17177 - DNA, 80 bp, synthetic construct
  misc_feature 1..80: note = Synthetic: >FJ938060_1-cand-210-289
  source 1..80: mol_type = other DNA
cactgtttcttataaagatggtgctatgattacaactatgccaaaggcacagctgggtttccaagacatctctaatttgg

SEQ ID NO: 17178 - DNA, 80 bp, synthetic construct
  misc_feature 1..80: note = Synthetic: >FJ938060_1-cand-390-469
  source 1..80: mol_type = other DNA
tagtagtggtgaccttctcgcctttaaaaatagcactactggggagatcttcactgttgtgccatgtgatctaacagcac

SEQ ID NO: 17179 - DNA, 80 bp, synthetic construct
  misc_feature 1..80: note = Synthetic: >FJ938060_1-cand-480-559
  source 1..80: mol_type = other DNA
gattaacgatgagatagtgggagttataacagctgtcaatcaaactgatctgtttgagtttgtcaaccatacacattcaa

SEQ ID NO: 17180 - DNA, 80 bp, synthetic construct
  misc_feature 1..80: note = Synthetic: >FJ938060_2-cand-90-169
  source 1..80: mol_type = other DNA
aaccagagattcgcattggacaccatattgacagctaatgatttctatggcttccagtggactgatacatatgttgacat

SEQ ID NO: 17181 - DNA, 80 bp, synthetic construct; identical to SEQ ID NO: 17177
  misc_feature 1..80: note = Synthetic: >FJ938061_1-cand-210-289
  source 1..80: mol_type = other DNA

SEQ ID NO: 17182 - DNA, 80 bp, synthetic construct; identical to SEQ ID NO: 17178
  misc_feature 1..80: note = Synthetic: >FJ938061_1-cand-390-469
  source 1..80: mol_type = other DNA

SEQ ID NO: 17183 - DNA, 80 bp, synthetic construct; identical to SEQ ID NO: 17179
  misc_feature 1..80: note = Synthetic: >FJ938061_1-cand-480-559
  source 1..80: mol_type = other DNA

SEQ ID NO: 17184 - DNA, 80 bp, synthetic construct; identical to SEQ ID NO: 17180
  misc_feature 1..80: note = Synthetic: >FJ938061_2-cand-90-169
  source 1..80: mol_type = other DNA

SEQ ID NO: 17185 - DNA, 80 bp, synthetic construct
  misc_feature 1..80: note = Synthetic: >FJ938061_2-cand-660-739
  source 1..80: mol_type = other DNA
gaccagttacatttcacatttgatgacaatacaactgcgtctatcagacaatttctgggtatattgccaccaactgtgcg

SEQ ID NO: 17186 - DNA, 80 bp, synthetic construct; identical to SEQ ID NO: 17133
  misc_feature 1..80: note = Synthetic: >FJ938062_2-cand-30-109
  source 1..80: mol_type = other DNA

SEQ ID NO: 17187 - DNA, 80 bp, synthetic construct
  misc_feature 1..80: note = Synthetic: >FJ938062_3-cand-0-79
  source 1..80: mol_type = other DNA
agtttaacactactgttgtaggtggtgaaaggcttggtggtttctattttgatggtttgagagatttgttaccacctagc

SEQ ID NO: 17188 - DNA, 80 bp, synthetic construct
  misc_feature 1..80: note = Synthetic: >FJ938062_3-cand-110-189
  source 1..80: mol_type = other DNA
ttgtttaacaaagtagtaaccagcggtcttggcactgtggatgatgattataaaaagtgttcagctggtacagatattgc

SEQ ID NO: 17189 - DNA, 80 bp, synthetic construct
  misc_feature 1..80: note = Synthetic: >FJ938062_4-cand-150-229
  source 1..80: mol_type = other DNA
taacaawgtggaataatgacaccttgactaattgtacktctgtcattacatattcttcctttgctatttgtaatactggt

SEQ ID NO: 17190 - DNA, 80 bp, synthetic construct; identical to SEQ ID NO: 17173
  misc_feature 1..80: note = Synthetic: >FJ938062_5-cand-0-79
  source 1..80: mol_type = other DNA

SEQ ID NO: 17191 - DNA, 80 bp, synthetic construct; identical to SEQ ID NO: 17138
  misc_feature 1..80: note = Synthetic: >FJ938062_6-cand-390-469
  source 1..80: mol_type = other DNA

SEQ ID NO: 17192 - DNA, 80 bp, synthetic construct
  misc_feature 1..80: note = Synthetic: >GCS_003_10-cand-0-79
  source 1..80: mol_type = other DNA
atgtacccagactcactaactgggaaatgcctttgcaggaggctgctgagtatgtgaagcgagagctcagtaagccaaat

SEQ ID NO: 17193 - DNA, 80 bp, synthetic construct
  misc_feature 1..80: note = Synthetic: >GCS_003_10-cand-90-169
  source 1..80: mol_type = other DNA
tttttgtgcccaactacttgctagattccgcacaaattccgcaaaatcgcgtcgtcatcactaatagtgtatggcgctgc

SEQ ID NO: 17194 - DNA, 80 bp, synthetic construct
  misc_feature 1..80: note = Synthetic: >GCS_003_10-cand-190-269
  source 1..80: mol_type = other DNA
cgtccgtgagattgccttcgacctcgatggagtacgcttcggtcgtggcggtactcatggtgttttgctcccgaggcaac

SEQ ID NO: 17195 - DNA, 80 bp, synthetic construct
  misc_feature 1..80: note = Synthetic: >GCS_003_10-cand-290-369
  source 1..80: mol_type = other DNA
accgtgagcatcgagctccgtaaatacggagtgggtggaggtgccgagatttttattcctaagctgtgggatgggttcgt

SEQ ID NO: 17196 - DNA, 80 bp, synthetic construct
  misc_feature 1..80: note = Synthetic: >GCS_003_10-cand-500-579
  source 1..80: mol_type = other DNA
gctgctccgataaaggaggtgcttggagataaaggagctggtatgtccctggtcgagctgacaaagttcctaggcaagta

SEQ ID NO: 17197 - DNA, 80 bp, synthetic construct
  misc_feature 1..80: note = Synthetic: >GCS_003_10-cand-590-669
  source 1..80: mol_type = other DNA
gatggttacgaattaccttccggcatagtgaaagtggccgtgaaggtggttcgcaaaaacctacctgtttctaaacagtc

SEQ ID NO: 17198 - DNA, 80 bp, synthetic construct
  misc_feature 1..80: note = Synthetic: >GCS_003_11-cand-730-809
  source 1..80: mol_type = other DNA
gttcgctgcattagtggatgcaaagactacgcctgaagcgccttgtgaggatgctagcataactactccctcttctaacc

SEQ ID NO: 17199 - DNA, 80 bp, synthetic construct
  misc_feature 1..80: note = Synthetic: >GCS_003_12-cand-0-79
  source 1..80: mol_type = other DNA
acgacacagcaatagccaaaactatgtttgaagcttatgctcaaagttaccttttaaagtataatatcgctatggataag

SEQ ID NO: 17200 - DNA, 80 bp, synthetic construct
  misc_feature 1..80: note = Synthetic: >GCS_003_12-cand-80-159
  source 1..80: mol_type = other DNA
gttaagtcattgtatgcaacagcactccagcaaatagcatccggaacgtccgttgaggctgtgcttaaagtgtttgttgg

SEQ ID NO: 17201 - DNA, 80 bp, synthetic construct
  misc_feature 1..80: note = Synthetic: >GCS_003_12-cand-170-249
  source 1..80: mol_type = other DNA
gaggaagctcgtgatttagagtcggatgttgacactaacgagttagtgtcttgcattcgtatgtgtcatcaagatggctg

SEQ ID NO: 17202 - DNA, 80 bp, synthetic construct
  misc_feature 1..80: note = Synthetic: >GCS_003_12-cand-260-339
  source 1..80: mol_type = other DNA
actgcatcctggaataacttagtgcctacctacttaaagcaggaaacactaagtacactggaggttggccaacttatcac

SEQ ID NO: 17203 - DNA, 80 bp, synthetic construct
  misc_feature 1..80: note = Synthetic: >GCS_003_12-cand-350-429
  source 1..80: mol_type = other DNA
cgctacattaatgctaacatggctaaaagtgctgcagtgcaaatagtatggcgctatgcagattttgctcggctgagtga

SEQ ID NO: 17204 - DNA, 80 bp, synthetic construct
  misc_feature 1..80: note = Synthetic: >GCS_003_12-cand-730-809
  source 1..80: mol_type = other DNA
tgctaataagtttgaaacctttgacaattggtaccacaataggtttggtacatatgagaacaactggcgttgtcctatgg

SEQ ID NO: 17205 - DNA, 80 bp, synthetic construct
  misc_feature 1..80: note = Synthetic: >GCS_003_13-cand-480-559
  source 1..80: mol_type = other DNA
gcgtgagttgctcactgttattgtaaataagtttgctactactgttaagtgggccggctgtaagatagatggtttttaca

SEQ ID NO: 17206 - DNA, 80 bp, synthetic construct
  misc_feature 1..80: note = Synthetic: >GCS_003_13-cand-960-1039
  source 1..80: mol_type = other DNA
cttcacctatgatgtttgtgagggtctcgatggggttctcaacaagctcatggctccctttgaagtggaggaaggtacta

SEQ ID NO: 17207 - DNA, 80 bp, synthetic construct
  misc_feature 1..80: note = Synthetic: >GCS_003_14-cand-90-169
  source 1..80: mol_type = other DNA
gaatgaatcacaactgaacgaactagtactcaatctcctcaaggcggggaggttgctaatcagagatgtttcggacgttg

SEQ ID NO: 17208 - DNA, 80 bp, synthetic construct
  misc_feature 1..80: note = Synthetic: >GCS_003_14-cand-170-249
  source 1..80: mol_type = other DNA
ctcttagcggcgttgtttaacgcctgctggtgtgcgcgtccgacctgtattaagcctactgaagcatggggcacaccttc

SEQ ID NO: 17209 - DNA, 80 bp, synthetic construct
  misc_feature 1..80: note = Synthetic: >GCS_003_14-cand-250-329
  source 1..80: mol_type = other DNA
atttacaggtgtggagtatgtaccacataacaccacctatgtttcagtaccgctcaataagctatcatgcttactaccag

SEQ ID NO: 17210 - DNA, 80 bp, synthetic construct
  misc_feature 1..80: note = Synthetic: >GCS_003_14-cand-410-489
  source 1..80: mol_type = other DNA
gtcacaccaccaatgttcaaccttacatatggcaatgtgacacctggtgtatacaatacgtcattcctaccagtctttga

SEQ ID NO: 17211 - DNA, 80 bp, synthetic construct
  misc_feature 1..80: note = Synthetic: >GCS_003_14-cand-490-569
  source 1..80: mol_type = other DNA
tgggctccttgtgcatacctacatgaatcggtttgcgcacttggataaccctaataggacatgtcaggagccgtttggcg

SEQ ID NO: 17212 - DNA, 80 bp, synthetic construct
  misc_feature 1..80: note = Synthetic: >GCS_003_14-cand-570-649
  source 1..80: mol_type = other DNA
ttgtgtttggaacaaccttcgagcaagaccgtattgctatggtcataattgcaccaggtgagtttggtatgtggggtcag

SEQ ID NO: 17213 - DNA, 80 bp, synthetic construct
  misc_feature 1..80: note = Synthetic: >GCS_003_14-cand-650-729
  source 1..80: mol_type = other DNA
gtcactcgacctaacaccacttttgtccatgtggtggcatgtagtaatgctactatctgtgcctaccctatgttcaatag

SEQ ID NO: 17214 - DNA, 80 bp, synthetic construct
  misc_feature 1..80: note = Synthetic: >GCS_003_14-cand-730-809
  source 1..80: mol_type = other DNA
gtggggacctgcaggtagcatacatgccgaagactcttttgttgagcacaattcctcgtgctttttgaatgacacttttg

SEQ ID NO: 17215 - DNA, 80 bp, synthetic construct
  misc_feature 1..80: note = Synthetic: >GCS_003_14-cand-810-889
  source 1..80: mol_type = other DNA
agatcccaatgggtacatctcgtgtcaatttggcttttaggtttcaggatggcaacctcttactgtatcatacagcctgg

SEQ ID NO: 17216 - DNA, 80 bp, synthetic construct
  misc_feature 1..80: note = Synthetic: >GCS_003_14-cand-890-969
  source 1..80: mol_type = other DNA
ttgccgactgaaaactatactttaagtggcgactaccccctacgttatgcgcgtagtgtcggtgtaggctccaatttacc

SEQ ID NO: 17217 - DNA, 80 bp, synthetic construct
  misc_feature 1..80: note = Synthetic: >GCS_003_14-cand-970-1049
  source 1..80: mol_type = other DNA
ttttgctcaattcttccagtctgtcgctcgtgcacgtgacagtgcatgtgctttcctacataataatttgtatatagccc

SEQ ID NO: 17218 - DNA, 80 bp, synthetic construct
  misc_feature 1..80: note = Synthetic: >GCS_003_14-cand-1210-1289
  source 1..80: mol_type = other DNA
caaaaagcttgtgcaagttacacagcaagagagctcctgcgcgataccgtacactaccattctagaaccaccctcacctg

SEQ ID NO: 17219 - DNA, 80 bp, synthetic construct
  misc_feature 1..80: note = Synthetic: >GCS_003_14-cand-1290-1369
  source 1..80: mol_type = other DNA
ctgcgtgggtgcgtgctactatttctaattgtactttcgactttgaatcgctactgcggacactgccgacatacaatttg

SEQ ID NO: 17220 - DNA, 80 bp, synthetic construct
  misc_feature 1..80: note = Synthetic: >GCS_003_14-cand-1370-1449
  source 1..80: mol_type = other DNA
aagtgctatggcatctcacctgctcgacttagcactatgtgctatgcaggggtgacgctagatatttttaagctaaacac

SEQ ID NO: 17221 - DNA, 80 bp, synthetic construct
  misc_feature 1..80: note = Synthetic: >GCS_003_14-cand-1450-1529
  source 1..80: mol_type = other DNA
tacccacttgtccaacatgcttggatctgtgccggatgctgttagtatttacaattatgccttgcctagcaacttttatg

SEQ ID NO: 17222 - DNA, 80 bp, synthetic construct
  misc_feature 1..80: note = Synthetic: >GCS_003_14-cand-1600-1679
  source 1..80: mol_type = other DNA
aattaagccaggtggcagacagttgtttaacagctttgtgtccaaagtcttagactcacctagttcacagtgcactcctg

SEQ ID NO: 17223 - DNA, 80 bp, synthetic construct
  misc_feature 1..80: note = Synthetic: >GCS_003_15-cand-0-79
  source 1..80: mol_type = other DNA
gcaactattatgttagtggtatcactcaggaaaccacagccttacaggactttgtagttgacatagttgtcaacggtgct

SEQ ID NO: 17224 - DNA, 80 bp, synthetic construct
  misc_feature 1..80: note = Synthetic: >GCS_003_15-cand-320-399
  source 1..80: mol_type = other DNA
gttcttgttgatgatgaacgcacctttcaagaccaaattggtgtggtgttccataatggtgttgacatttcatctagagt

SEQ ID NO: 17225 - DNA, 80 bp, synthetic construct
  misc_feature 1..80: note = Synthetic: >GCS_003_15-cand-640-719
  source 1..80: mol_type = other DNA
ggttgaattttctacaccttggattagcaccgcatttgacgcgctcaaaggtggtaacccattgccgatagtggaagttt

SEQ ID NO: 17226 - DNA, 80 bp, synthetic construct
  misc_feature 1..80: note = Synthetic: >GCS_003_15-cand-1280-1359
  source 1..80: mol_type = other DNA
gtgaagcgcggtgattactatttcaccaaagcacctatagatgttgtagctgcacccaaagtagttacaccatatgatgg

SEQ ID NO: 17227 - DNA, 80 bp, synthetic construct
  misc_feature 1..80: note = Synthetic: >GCS_003_15-cand-1680-1759
  source 1..80: mol_type = other DNA
ataaggttgtgactgaaccactctacggtttgactgctccaattgttttggatggtgtgaattacgtccccggcaagaag

SEQ ID NO: 17228 - DNA, 80 bp, synthetic construct
  misc_feature 1..80: note = Synthetic: >GCS_003_15-cand-1760-1839
  source 1..80: mol_type = other DNA
ggtgacctactctgtttgaaagagtttactattacagatttgaaaaccttctatgtagaaggaaaccaaccttttgtgtt

SEQ ID NO: 17229 - DNA, 80 bp, synthetic construct
  misc_feature 1..80: note = Synthetic: >GCS_003_15-cand-1840-1919
  source 1..80: mol_type = other DNA
gctgaaagaaaaccatttaagcaagctgttggggctaaaaattagcagcaacaagcttgttgtcaacaagattagcagtg

SEQ ID NO: 17230 - DNA, 80 bp, synthetic construct
  misc_feature 1..80: note = Synthetic: >GCS_003_16-cand-330-409
  source 1..80: mol_type = other DNA
aacaatggtcctgcaaccattaagcctgaaaagccccgtgctgctcctatgcaaaatgtctcttggtttgcaccacttgt

SEQ ID NO: 17231 - DNA, 80 bp, synthetic construct
  misc_feature 1..80: note = Synthetic: >GCS_003_16-cand-410-489
  source 1..80: mol_type = other DNA
gcagactgggaagagtgaccttaaattcgcccacggcgaaggtgtgcccgttagccaaggtgtggatagtacataccagc

SEQ ID NO: 17232 - DNA, 80 bp, synthetic construct
  misc_feature 1..80: note = Synthetic: >GCS_003_16-cand-650-729
  source 1..80: mol_type = other DNA
taacgtcaacaagcttggcaatatgggcactcgtaaccccaacaatgactcagctatccccgtgcaattgccagagggca

SEQ ID NO: 17233 - DNA, 80 bp, synthetic construct
  misc_feature 1..80: note = Synthetic: >GCS_003_16-cand-730-809
  source 1..80: mol_type = other DNA
ttcctaagggcttctacgctgagggaacacggtccaggaactctagccgttctagctcacgtggatctagtcgcaacaca

SEQ ID NO: 17234 - DNA, 80 bp, synthetic construct
  misc_feature 1..80: note = Synthetic: >GCS_003_16-cand-810-889
  source 1..80: mol_type = other DNA
tcagcgtctaactccagagctaattctcgtgctagttcaccaggtcgtaatttaccaccacaggctggtagtgaaccttg

SEQ ID NO: 17235 - DNA, 80 bp, synthetic construct
  misc_feature 1..80: note = Synthetic: >GCS_003_16-cand-970-1049
  source 1..80: mol_type = other DNA
ttacaaagcagggagctgctaacatggctgacaagcttcggcataagcgcacacctcataaaggtagcggcgttactcag

SEQ ID NO: 17236 - DNA, 80 bp, synthetic construct
  misc_feature 1..80: note = Synthetic: >GCS_003_16-cand-2200-2279
  source 1..80: mol_type = other DNA
tgctttgacaatggtattgtcggcggctgccagacttaccacctagcttgcccccagcaccaatcaatacttcacctaag

SEQ ID NO: 17237 - DNA, 80 bp, synthetic construct
  misc_feature 1..80: note = Synthetic: >GCS_003_16-cand-2520-2599
  source 1..80: mol_type = other DNA
ctgtgtagatggcgaccaacccaactgcagggagctagttaacacctgtcaacatgtcctagttccagttaaagtcacac

SEQ ID NO: 17238 - DNA, 80 bp, synthetic construct
  misc_feature 1..80: note = Synthetic: >GCS_003_16-cand-2600-2679
  source 1..80: mol_type = other DNA
ctaatgtcacgctctttatgtgcgtggagttggagggagtaagattccaagaagtgggtgttacacattactactctctg

SEQ ID NO: 17239 - DNA, 80 bp, synthetic construct
  misc_feature 1..80: note = Synthetic: >GCS_003_16-cand-2680-2759
  source 1..80: mol_type = other DNA
gtcaacccttacggtaaatggcagtgccaacacactaccaccagggaaggtactcttaaatggggtacaaagactattac

SEQ ID NO: 17240 - DNA, 80 bp, synthetic construct
  misc_feature 1..80: note = Synthetic: >GCS_003_16-cand-2840-2919
  source 1..80: mol_type = other DNA
ctcgcatccatcatgaagtggcccatgtttgtgttagcttcaagggtttctactttgatgagagcgttagattgtttatt

SEQ ID NO: 17241 - DNA, 80 bp, synthetic construct
  misc_feature 1..80: note = Synthetic: >GCS_003_16-cand-3260-3339
  source 1..80: mol_type = other DNA
gcctattacgtggctaaacatgcgcgtgctggtaacaatggtgcgcacaattttgcagtatgacacctctcgcacaatgt

SEQ ID NO: 17242 - DNA, 80 bp, synthetic construct
  misc_feature 1..80: note = Synthetic: >GCS_003_2-cand-0-79
  source 1..80: mol_type = other DNA
ggtggttattcactaaaatgagcttttacgatcccgtaaacatttcagtttctaatacgcaggtcctagcggcttgcggt

SEQ ID NO: 17243 - DNA, 80 bp, synthetic construct
  misc_feature 1..80: note = Synthetic: >GCS_003_2-cand-100-179
  source 1..80: mol_type = other DNA
ctacaccgtccttgagccggcggttgacactagctcctttaattttacagaagagtttgaaaagtggtacgtcaaccaga

SEQ ID NO: 17244 - DNA, 80 bp, synthetic construct
  misc_feature 1..80: note = Synthetic: >GCS_003_3-cand-0-79
  source 1..80: mol_type = other DNA
tttattagctgttgtgtgggtttcatggctatgtttataaagcataagcacacctttttgactgtgtacttgctacctgt

SEQ ID NO: 17245 - DNA, 80 bp, synthetic construct
  misc_feature 1..80: note = Synthetic: >GCS_003_3-cand-110-189
  source 1..80: mol_type = other DNA
gtaccaacctgagggcatacagggctatttgttgtatgtgtacaactacgtaaaccctggacgctttgacatgggctttg

SEQ ID NO: 17246 - DNA, 80 bp, synthetic construct
  misc_feature 1..80: note = Synthetic: >GCS_003_4-cand-0-79
  source 1..80: mol_type = other DNA
tgtgcacacgcgatgatttggtaaatccagactatcagcgtttgtccatgcgtgctgcaaactacgacttccatgtttca

SEQ ID NO: 17247 - DNA, 80 bp, synthetic construct
  misc_feature 1..80: note = Synthetic: >GCS_003_4-cand-140-219
  source 1..80: mol_type = other DNA
acagtagatgctacaaatcccaaaacacctgcgcattcatttgtgcgtgtgtctacaggtcaggccattagtattttggc

SEQ ID NO: 17248 - DNA, 80 bp, synthetic construct
  misc_feature 1..80: note = Synthetic: >GCS_003_5-cand-160-239
  source 1..80: mol_type = other DNA
aggtgcttaccccatgctgcctagcatttacgcattgttgtttttgtatgtgacgtgctattttagtagcgatgtggctg

SEQ ID NO: 17249 - DNA, 80 bp, synthetic construct
  misc_feature 1..80: note = Synthetic: >GCS_003_7-cand-0-79
  source 1..80: mol_type = other DNA
ctcaagctaatgtcggctcatataacttttctggtcttatgggctgtctaggttccgactgtcaggagaagcagtatcgt

SEQ ID NO: 17250 - DNA, 80 bp, synthetic construct
  misc_feature 1..80: note = Synthetic: >GCS_003_8-cand-0-79
  source 1..80: mol_type = other DNA
ctgcaatgtataagcaggctcgcgctgaagacaagcgttctaaagttacatcagccatgcagaccatgttgtttaacatg

SEQ ID NO: 17251 - DNA, 80 bp, synthetic construct
  misc_feature 1..80: note = Synthetic: >GCS_003_8-cand-60-139
  source 1..80: mol_type = other DNA
agaccatgttgtttaacatgattcggcgacttgactcagacgcactaaatagtattcttaccaatgcgcgtaatggtatt

SEQ ID NO: 17252 - DNA, 80 bp, synthetic construct
  misc_feature 1..80: note = Synthetic: >GCS_003_8-cand-150-229
  source 1..80: mol_type = other DNA
gtgtcataccacgcacagcagctaacaagttattgttggttgtgccggattactctgtcttttcatccaccgtcgtattg

SEQ ID NO: 17253 - DNA, 80 bp, synthetic construct
  misc_feature 1..80: note = Synthetic: >GCS_003_8-cand-240-319
  source 1..80: mol_type = other DNA
catatgctggcagtgcatgggatgtgactcaggtttccgacgctgatggtaagaatgttaatgttacagatataacgcgt

SEQ ID NO: 17254 - DNA, 80 bp, synthetic construct
  misc_feature 1..80: note = Synthetic: >GCS_003_8-cand-300-379
  source 1..80: mol_type = other DNA
atgttacagatataacgcgtgagaatagcgctaaccttgcttggcccttggttataaccgcagtcaggcaggttgctacc

SEQ ID NO: 17255 - DNA, 80 bp, synthetic construct
  misc_feature 1..80: note = Synthetic: >GCS_003_8-cand-390-469
  source 1..80: mol_type = other DNA
aactgcagaataatgagctgatgccacaagccgttaagagaatggctgtgacagcaggtattagtcagactagctgtact

SEQ ID NO: 17256 - DNA, 80 bp, synthetic construct
  misc_feature 1..80: note = Synthetic: >GCS_003_9-cand-180-259
  source 1..80: mol_type = other DNA
cactcaatggcaccttttgtttctactgctgacaactttgcggtgttgcgtaccacttgcagcagatttgtttttcctgt

SEQ ID NO: 17257 - DNA, 80 bp, synthetic construct
  misc_feature 1..80: note = Synthetic: >GCS_003_9-cand-270-349
  source 1..80: mol_type = other DNA
aaggacaacgttgttgtgttaaccacctcccgtggtgtcttttgtaatggcatccatgtagagggaccaacagcgctgtc

SEQ ID NO: 17258 - DNA, 80 bp, synthetic construct
  misc_feature 1..80: note = Synthetic: >GCS_003_9-cand-350-429
  source 1..80: mol_type = other DNA
tgataatgctagtattgtaagtctgtttagcaccaccattttgttgctggacagagttgagcagggctatgactacacag

SEQ ID NO: 17259 - DNA, 80 bp, synthetic construct
  misc_feature 1..80: note = Synthetic: >GCS_003_9-cand-440-519
  source 1..80: mol_type = other DNA
cattagtcagcaaatactgcgtaatgctgaaaacaacccccagggggtggtaaaccctgaatttgacgatgtcgaactgt

SEQ ID NO: 17260 - DNA, 80 bp, synthetic construct
  misc_feature 1..80: note = Synthetic: >GCS_008_1-cand-40-119
  source 1..80: mol_type = other DNA
tttctttaagttgaaattttactacgttaagtttttcttaaagttgtgcttgttgctttatactatatacgctctcacct

SEQ ID NO: 17261 - DNA, 80 bp, synthetic construct
  misc_feature 1..80: note = Synthetic: >GCS_008_2-cand-0-79
  source 1..80: mol_type = other DNA
tcttagaagagtttgactataaaatgcctgttagtggttttaatatgcaaggtttattgagtattgtgctctgttgtttt

SEQ ID NO: 17262 - DNA, 80 bp, synthetic construct
  misc_feature 1..80: note = Synthetic: >GCS_017_1-cand-0-79
  source 1..80: mol_type = other DNA
gatgggttttactctgctaatttccttgaaaacaaagaattgcctaacacattggtttctcttcccgttcattatcaaca

SEQ ID NO: 17263 - DNA, 80 bp, synthetic construct
  misc_feature 1..80: note = Synthetic: >GCS_017_1-cand-210-289
  source 1..80: mol_type = other DNA
tttatctatgataaggttattgtatcagagggagaccgcagttttcatggttatttaaaaacaggtaattgtcctttttc

SEQ ID NO: 17264 - DNA, 80 bp, synthetic construct
  misc_feature 1..80: note = Synthetic: >GCS_017_1-cand-310-389
  source 1..80: mol_type = other DNA
ttgtaaagtttgaaacattgtgtttttctacagttaatgtaccaggtagctgtgttatgcctgtagaaatcacatggcat

SEQ ID NO: 17265 - DNA, 80 bp, synthetic construct
  misc_feature 1..80: note = Synthetic: >GCS_017_1-cand-410-489
  source 1..80: mol_type = other DNA
tggcgccctctatgtatcctacactgatgggtcatctctaaccggtgtacctaaacctattagtggaatttttgagttta

SEQ ID NO: 17266 - DNA, 80 bp, synthetic construct
  misc_feature 1..80: note = Synthetic: >GCS_017_1-cand-510-589
  source 1..80: mol_type = other DNA
tgtactaagtacaacatctatgattttgttggtactggcataattcgtgagtctaatcaaactttgtttggtggtattac

SEQ ID NO: 17267 - DNA, 80 bp, synthetic construct
  misc_feature 1..80: note = Synthetic: >GCS_017_1-cand-610-689
  source 1..80: mol_type = other DNA
acctattaggtttcaaaaatgtcactactggtaaagtttacactgttacaccttgcaaccaaccagatcaagttgttgtg

SEQ ID NO: 17268 - DNA, 80 bp, synthetic construct
  misc_feature 1..80: note = Synthetic: >GCS_017_1-cand-710-789
  source 1..80: mol_type = other DNA
tgctatgattgctgataatcaaactcgttatggtttgaagaatgtcatacagttatccaacttttattatgctagtaatg

SEQ ID NO: 17269 - DNA, 80 bp, synthetic construct
  misc_feature 1..80: note = Synthetic: >GCS_017_2-cand-130-209
  source 1..80: mol_type = other DNA
gagaacaataatggtggctggttttatcttaaaatttgtaagtacaaaacagctcaagtgccgtcctacgggtctgcagg

SEQ ID NO: 17270 - DNA, 80 bp, synthetic construct
  misc_feature 1..80: note = Synthetic: >GCS_017_2-cand-220-299
  source 1..80: mol_type = other DNA
cttgtcaacttgaggtttaaagctgttttagcacatgctggtggtcagatctacggtttcactgtttctggggaaaccgt

SEQ ID NO: 17271 - DNA, 80 bp, synthetic construct
  misc_feature 1..80: note = Synthetic: >GCS_017_2-cand-310-389
  source 1..80: mol_type = other DNA
tggactaccggtgtttatacattttatgtacctggtgcttctaattggaattctgttggacttcggtgccaagtcaacca

SEQ ID NO: 17272 - DNA, 80 bp, synthetic construct
  misc_feature 1..80: note = Synthetic: >GCS_017_2-cand-400-479
  source 1..80: mol_type = other DNA
tactctatcgtgtatgagcagagcacagttaatgttactactaatgccaatggtgaaattgttgcttataacccttgcat

SEQ ID NO: 17273 - DNA, 80 bp, synthetic construct
  misc_feature 1..80: note = Synthetic: >GCS_017_2-cand-490-569
  source 1..80: mol_type = other DNA
ggttatgcagaaaatatttttgctgttgaagaaggtggtaaaataccagcttcttttgcctttaacaattggtttttgct

SEQ ID NO: 17274 - DNA, 80 bp, synthetic construct
  misc_feature 1..80: note = Synthetic: >GCS_017_2-cand-580-659
  source 1..80: mol_type = other DNA
tcatcattagtagatggtgttgttaggtcttcacaacctttgttactaaattgtttgtgggctgtacctggtttgcaatc

SEQ ID NO: 17275 - DNA, 80 bp, synthetic construct
  misc_feature 1..80: note = Synthetic: >GCS_017_2-cand-670-749
  source 1..80: mol_type = other DNA
tatgtgtactttaacgtcacaggttccgatattaattgcaatggttataaatttaatggaactgccgacgttttacgtta

SEQ ID NO: 17276 - DNA, 80 bp, synthetic construct
  misc_feature 1..80: note = Synthetic: >GCS_017_2-cand-770-849
  source 1..80: mol_type = other DNA
cttcaattgataatttgaagaatggcgttatttcattgttaacctcttatggtgttgttatgttttattgcaccaatgcc

SEQ ID NO: 17277 - DNA, 80 bp, synthetic construct
  misc_feature 1..80: note = Synthetic: >GCS_019_10-cand-0-79
  source 1..80: mol_type = other DNA
cccgcaatgacaatcgttccaccaatcagtctcgcaaccagtcgcgtaacacgtcgcgatctaggtctaactcacgtggt

SEQ ID NO: 17278 - DNA, 80 bp, synthetic construct
  misc_feature 1..80: note = Synthetic: >GCS_019_10-cand-80-159
  source 1..80: mol_type = other DNA
cgatccggaaattccacatccccggacgatcttgttgctgctgtgcgagctgctttggagggcatgggcttcgaacccat

SEQ ID NO: 17279 - DNA, 80 bp, synthetic construct
  misc_feature 1..80: note = Synthetic: >GCS_019_10-cand-340-419
  source 1..80: mol_type = other DNA
tgatttcgaccacaattttggtgattctgagcttattcgtcttggagttgaagcaccccactatccacagcttgcagaac

SEQ ID NO: 17280 - DNA, 80 bp, synthetic construct
  misc_feature 1..80: note = Synthetic: >GCS_019_10-cand-510-589
  source 1..80: mol_type = other DNA
tgcttgtccccaaagacaacaaacatttgggtgctttcctgcagcaagtcaatgctttcgctgatgatgacaaagctcca

SEQ ID NO: 17281 - DNA, 80 bp, synthetic construct
  misc_feature 1..80: note = Synthetic: >GCS_019_10-cand-600-679
  source 1..80: mol_type = other DNA
caaaagtgaaacgccaaaagtccaagacagaaaagaaagatgacgtcttggatggcctgaacgttgctgcccctgctttt

SEQ ID NO: 17282 - DNA, 80 bp, synthetic construct
  misc_feature 1..80: note = Synthetic: >GCS_019_10-cand-680-759
  source 1..80: mol_type = other DNA
gagccaaaagaacagcgtgaaccgcgcccactcaaattctctgaagttgccaaacatgcagtcgaccctctcgatgagtt

SEQ ID NO: 17283 - DNA, 80 bp, synthetic construct
  misc_feature 1..80: note = Synthetic: >GCS_019_10-cand-760-839
  source 1..80: mol_type = other DNA
gaaggtcgaaatggtagatgaggttaagtatgagtcttctgcttaaacagttcaactaaacacatgttgtttttcttgct

SEQ ID NO: 17284 - DNA, 80 bp, synthetic construct
  misc_feature 1..80: note = Synthetic: >GCS_019_10-cand-840-919
  source 1..80: mol_type = other DNA
ttacaaggaatctactctgcaccttgtgttaacaattttctttctttgcattgttgttgcccaatgtatgcaaatttttg

SEQ ID NO: 17285 - DNA, 80 bp, synthetic construct
  misc_feature 1..80: note = Synthetic: >GCS_019_10-cand-920-999
  source 1..80: mol_type = other DNA
tgaagacattgtagtgtactattttgtatgctactgtagctttgtgtttgcaattgttatggaccttgctgtagagactt

SEQ ID NO: 17286 - DNA, 80 bp, synthetic construct
  misc_feature 1..80: note = Synthetic: >GCS_019_10-cand-1080-1159
  source 1..80: mol_type = other DNA
ctgttgatctattcggtaatagtcaactaatcaataacccacatggaccctctttgcattgtgctcacggcaattctcat

SEQ ID NO: 17287 - DNA, 80 bp, synthetic construct
  misc_feature 1..80: note = Synthetic: >GCS_019_10-cand-1390-1469
  source 1..80: mol_type = other DNA
ctgagtttgtcaatgtagttcttgctgtaggcctttttggtctaaatgctatctttaccataaatttctttttggtttgg

SEQ ID NO: 17288 - DNA, 80 bp, synthetic construct
  misc_feature 1..80: note = Synthetic: >GCS_019_11-cand-0-79
  source 1..80: mol_type = other DNA
tctcaaaattggacttgttccactgcacagaatacttatagaaacgcacgtggtgttttctttaggtaccacagtggtgc

SEQ ID NO: 17289 - DNA, 80 bp, synthetic construct
  misc_feature 1..80: note = Synthetic: >GCS_019_11-cand-90-169
  source 1..80: mol_type = other DNA
gaaataggtattacttctacaccatttactagtgaatctctttctctttatttttattggcgtggtaatagacctgacaa

SEQ ID NO: 17290 - DNA, 80 bp, synthetic construct
  misc_feature 1..80: note = Synthetic: >GCS_019_11-cand-180-259
  source 1..80: mol_type = other DNA
catcttagagtttgtaaatggttgtggccttttaacatgactggtgacaaatggccccttagaggtcgtgattgtgttat

SEQ ID NO: 17291 - DNA, 80 bp, synthetic construct
  misc_feature 1..80: note = Synthetic: >GCS_019_11-cand-270-349
  source 1..80: mol_type = other DNA
tttcaattgaacttacagcatggaattcccaacatcgttggtttgacttggtctggtgatagacttcgtctacatggtct

SEQ ID NO: 17292 - DNA, 80 bp, synthetic construct
  misc_feature 1..80: note = Synthetic: >GCS_019_11-cand-350-429
  source 1..80: mol_type = other DNA
ttccactaccaggtcgttttaccttcctaatgattgggacacgctgtctgtcaagtgccatttgacccccacttgtgttt

SEQ ID NO: 17293 - DNA, 80 bp, synthetic construct
  misc_feature 1..80: note = Synthetic: >GCS_019_11-cand-430-509
  source 1..80: mol_type = other DNA
accaacctgtgtttgagatgtcaacatttaatgttacaacaatggctaatggcgagattgaacattatgagctctgtgag

SEQ ID NO: 17294 - DNA, 80 bp, synthetic construct
  misc_feature 1..80: note = Synthetic: >GCS_019_11-cand-510-589
  source 1..80: mol_type = other DNA
gattgtaatgggtttccacagcacatttttgccgttgaggaaggtggcaagataccacctgactttgattatactaattg

SEQ ID NO: 17295 - DNA, 80 bp, synthetic construct
  misc_feature 1..80: note = Synthetic: >GCS_019_11-cand-600-679
  source 1..80: mol_type = other DNA
actaactcgtccactatagtagaaggcaaacttgtttcttctcaacctttgcttataaattgtttgtggccagtcccagc

SEQ ID NO: 17296 - DNA, 80 bp, synthetic construct
  misc_feature 1..80: note = Synthetic: >GCS_019_11-cand-690-769
  source 1..80: mol_type = other DNA
acagctgaccctatcaattttacttttgcgtatgatgagagaaggtgcaatggtttttcttcgaatcgctctgctgatgt

SEQ ID NO: 17297 - DNA, 80 bp, synthetic construct
  misc_feature 1..80: note = Synthetic: >GCS_019_11-cand-770-849
  source 1..80: mol_type = other DNA
tttgcggttttctttgaactttacatcaggtgagcgtgtgttgggcggtgttggcagtgttactttgtatgcttctgaga

SEQ ID NO: 17298 - DNA, 80 bp, synthetic construct
  misc_feature 1..80: note = Synthetic: >GCS_019_11-cand-850-929
  source 1..80: mol_type = other DNA
gtagtgcttctgtcaccttcagttgtataaataacactgaccctaagtctggccctcattctattctttttggctatgtc

SEQ ID NO: 17299 - DNA, 80 bp, synthetic construct
  misc_feature 1..80: note = Synthetic: >GCS_019_11-cand-930-1009
  source 1..80: mol_type = other DNA
ttgcagcctttttattgttttgctagctttaacgggagttttacttttgttggtatgttgcctcctgttttgcgcgagat

SEQ ID NO: 17300 - DNA, 80 bp, synthetic construct
  misc_feature 1..80: note = Synthetic: >GCS_019_11-cand-1010-1089
  source 1..80: mol_type = other DNA
agcgatttctgcgactggtgctatctatcttaatggctacagggtttttcaaacgtttgcgttgtctggtgtttatttta

SEQ ID NO: 17301 - DNA, 80 bp, synthetic construct
  misc_feature 1..80: note = Synthetic: >GCS_019_11-cand-1090-1169
  source 1..80: mol_type = other DNA
acatcacgtccaatgtaaacactgatttttggactgttgctttcacctcctacactgatgttcttgtggaggtgaatgct

SEQ ID NO: 17302 - DNA, 80 bp, synthetic construct
  misc_feature 1..80: note = Synthetic: >GCS_019_11-cand-1170-1249
  source 1..80: mol_type = other DNA
actggtattaccaggttggcttattgtgatacaccagttgatcgtcttaagtgtcaacagttgtcgtttgaccttcctga

SEQ ID NO: 17303 - DNA, 80 bp, synthetic construct
  misc_feature 1..80: note = Synthetic: >GCS_019_11-cand-1250-1329
  source 1..80: mol_type = other DNA
cggtttttatcctgcttctaacgttttggctgcaactcttcctagaacatttgtttctttaccacagcattttacccaca

SEQ ID NO: 17304 - DNA, 80 bp, synthetic construct
  misc_feature 1..80: note = Synthetic: >GCS_019_11-cand-1330-1409
  source 1..80: mol_type = other DNA
cctttgttaatttgtttgtctcttatggtctttggggtggtgcttctcatggtcctccaacatctcaacatgttggcttc

SEQ ID NO: 17305 - DNA, 80 bp, synthetic construct
  misc_feature 1..80: note = Synthetic: >GCS_019_11-cand-1410-1489
  source 1..80: mol_type = other DNA
attacttataatgaaactgcagggacgtactcaaattcgtctgctaaaactatttgtgtttctaccacacagtttacaac

SEQ ID NO: 17306 - DNA, 80 bp, synthetic construct
  misc_feature 1..80: note = Synthetic: >GCS_019_11-cand-1490-1569
  source 1..80: mol_type = other DNA
aaatttgacttttgtgccacccccacctccctttacacacccagattggtttcaacctgcaccttatgagttatcaatta

SEQ ID NO: 17307 - DNA, 80 bp, synthetic construct
  misc_feature 1..80: note = Synthetic: >GCS_019_11-cand-1570-1649
  source 1..80: mol_type = other DNA
aacctattgattgtccgtttaattttgatactcttaataattttgttacgtttgattccatctgtttctcattagagaag

SEQ ID NO: 17308 - DNA, 80 bp, synthetic construct
  misc_feature 1..80: note = Synthetic: >GCS_019_12-cand-20-99
  source 1..80: mol_type = other DNA
tcaccttgaatggtgtcgtttactaccttgcatggcaggttgagcgtaaaccactaccgtatgctaaccaaaacttgttg

SEQ ID NO: 17309 - DNA, 80 bp, synthetic construct
  misc_feature 1..80: note = Synthetic: >GCS_019_12-cand-100-179
  source 1..80: mol_type = other DNA
gctattactgagatcttgtatctgtccaaagaatatcacacacttcttccaggttctgttcttacaactgctgcaccccc

SEQ ID NO: 17310 - DNA, 80 bp, synthetic construct
  misc_feature 1..80: note = Synthetic: >GCS_019_12-cand-190-269
  source 1..80: mol_type = other DNA
gctaaggttgtgctcagtgatgattggaagtctctgtatgaagagtgtggttcaccctttgtcaacaatggtaccaaact

SEQ ID NO: 17311 - DNA, 80 bp, synthetic construct
  misc_feature 1..80: note = Synthetic: >GCS_019_12-cand-270-349
  source 1..80: mol_type = other DNA
tcttgaagtcattccaaaacctgtgtttttgaatgctttcgtaaattgtaagtgtggtaacagtggttggtctgtgggcg

SEQ ID NO: 17312 - DNA, 80 bp, synthetic construct
  misc_feature 1..80: note = Synthetic: >GCS_019_12-cand-350-429
  source 1..80: mol_type = other DNA
attggactagttataagtcagcttgttgtggtgtaaatgcccaaaaggtctgcgtcgttcctggtgaagtcgttgctggt

SEQ ID NO: 17313 - DNA, 80 bp, synthetic construct
  misc_feature 1..80: note = Synthetic: >GCS_019_12-cand-430-509
  source 1..80: mol_type = other DNA
gacattgtcgtcacttctaaggcagcgggcgttggggtgaagtactacaatggtatgacactcaagttcgtcaaggaatg

SEQ ID NO: 17314 - DNA, 80 bp, synthetic construct
  misc_feature 1..80: note = Synthetic: >GCS_019_12-cand-750-829
  source 1..80: mol_type = other DNA
tgatatcataaacagccataaaccatggttcgtccgcaaacttgcaggtcttgtggatgtagcctggaacaaatttgtga

SEQ ID NO: 17315 - DNA, 80 bp, synthetic construct
  misc_feature 1..80: note = Synthetic: >GCS_019_12-cand-910-989
  source 1..80: mol_type = other DNA
actaacggtgtcatcaggattgttgctgatgtgccttctatgtttgctgatgcctttgagctgtttaaatctgcagttag

SEQ ID NO: 17316 - DNA, 80 bp, synthetic construct
  misc_feature 1..80: note = Synthetic: >GCS_019_12-cand-970-1049
  source 1..80: mol_type = other DNA
ctgtttaaatctgcagttagtaccattttcgatgttgcatcggaagtggttactattggtggacaacagttcagagccgt

SEQ ID NO: 17317 - DNA, 80 bp, synthetic construct
  misc_feature 1..80: note = Synthetic: >GCS_019_12-cand-1130-1209
  source 1..80: mol_type = other DNA
gcactgccaagtatgccaatgctgtcattggttgtaccgtggatgtgacaccaacacacattgagtccgctgttgttaat

SEQ ID NO: 17318 - DNA, 80 bp, synthetic construct
  misc_feature 1..80: note = Synthetic: >GCS_019_12-cand-1530-1609
  source 1..80: mol_type = other DNA
gcgtgagtacatgttttgcacacccttttacatgaaacctgtggctgacaaatgggaggcgttttgtgtgagacactgtt

SEQ ID NO: 17319 - DNA, 80 bp, synthetic construct
  misc_feature 1..80: note = Synthetic: >GCS_019_12-cand-1690-1769
  source 1..80: mol_type = other DNA
tcacaggagtttttggttaacttgcgtcctaagtgtcctaccgtcctttttcaaatagatggtgggaagatttggaacac

SEQ ID NO: 17320 - DNA, 80 bp, synthetic construct
  misc_feature 1..80: note = Synthetic: >GCS_019_12-cand-1770-1849
  source 1..80: mol_type = other DNA
agttgttaactcatgtaaggctctgtttgactttgttaaatctgcccggtttactcttacccctgatggtttactgggta

SEQ ID NO: 17321 - DNA, 80 bp, synthetic construct
  misc_feature 1..80: note = Synthetic: >GCS_019_12-cand-1850-1929
  source 1..80: mol_type = other DNA
gttgtgctaagaagttccgtcagttcatggatttacttcttaagctctataatgaatttctggacttaacttgcaacgct

SEQ ID NO: 17322 - DNA, 80 bp, synthetic construct
  misc_feature 1..80: note = Synthetic: >GCS_019_12-cand-2010-2089
  source 1..80: mol_type = other DNA
tgcgcgtaagaaacctgttgatgttgattgctcatttgacagccgtgttggcgaattttgggcattcattgatgccacct

SEQ ID NO: 17323 - DNA, 80 bp, synthetic construct
  misc_feature 1..80: note = Synthetic: >GCS_019_12-cand-2090-2169
  source 1..80: mol_type = other DNA
atgctattgacaatccaagggttgctgatgttgaacccttggaactctcagaggttgactttgtgcctcctactaatggt

SEQ ID NO: 17324 - DNA, 80 bp, synthetic construct
  misc_feature 1..80: note = Synthetic: >GCS_019_12-cand-2170-2249
  source 1..80: mol_type = other DNA
ggcagatttgttatctctgacgatttcctttggtacaacaaagatgacctttattatcctgctggtttgaatggtgtctt

SEQ ID NO: 17325 - DNA, 80 bp, synthetic construct
  misc_feature 1..80: note = Synthetic: >GCS_019_2-cand-20-99
  source 1..80: mol_type = other DNA
agacacttgtgtttacagttcaagctgcatttagtgacactggtgtgtgttatgacttgtatggtcccacaacgccagaa

SEQ ID NO: 17326 - DNA, 80 bp, synthetic construct
  misc_feature 1..80: note = Synthetic: >GCS_019_3-cand-100-179
  source 1..80: mol_type = other DNA
ccaaaatgtgctatttatgattgtctatgcactcttgtactttgccgttacacgcacttttagatacgcatggatttggt

SEQ ID NO: 17327 - DNA, 80 bp, synthetic construct
  misc_feature 1..80: note = Synthetic: >GCS_019_4-cand-0-79
  source 1..80: mol_type = other DNA
ctgcagttgttgacggtcaaattgtgggcgccatgtctagcactgatggtggtagtttcttgggtttcaatcgctcgatt

SEQ ID NO: 17328 - DNA, 80 bp, synthetic construct
  misc_feature 1..80: note = Synthetic: >GCS_019_4-cand-120-199
  source 1..80: mol_type = other DNA
attgcactgaccctgtgttagtgtattcttccattggtgtttgtaaagatggttctctcactaaggtcaacgtcaacaga

SEQ ID NO: 17329 - DNA, 80 bp, synthetic construct
  misc_feature 1..80: note = Synthetic: >GCS_019_5-cand-0-79
  source 1..80: mol_type = other DNA
cttttgtcttacgtgatgttggtaatgtcttgttttataacaatgaccagtacctcgtcacagcgcgtgacatgtatgaa

SEQ ID NO: 17330 - DNA, 80 bp, synthetic construct
  misc_feature 1..80: note = Synthetic: >GCS_019_5-cand-150-229
  source 1..80: mol_type = other DNA
aggaacagttacccgatattatcccagattatgtcgatgttaacaagaccttaaatgatttgttggaaaagttacctaac

SEQ ID NO: 17331 - DNA, 80 bp, synthetic construct
  misc_feature 1..80: note = Synthetic: >GCS_019_6-cand-0-79
  source 1..80: mol_type = other DNA
gaaagatagttttaccatgtttataacatgcgacactgtctgtgggtgtaaagttggcagagccgaatttgctggaagtt

SEQ ID NO: 17332 - DNA, 80 bp, synthetic construct
  misc_feature 1..80: note = Synthetic: >GCS_019_6-cand-110-189
  source 1..80: mol_type = other DNA
tcgcttatggtggttgttctaattgtagaaaagctatcatgcatacgatacggtcgatgaagggcactggtgttttctct

SEQ ID NO: 17333 - DNA, 80 bp, synthetic construct
  misc_feature 1..80: note = Synthetic: >GCS_019_7-cand-180-259
  source 1..80: mol_type = other DNA
atagattgcttaagggtgttgcatatgtggcattctcggggcctgtcgatagtgggcattacactgtttttgactcacgt

SEQ ID NO: 17334 - DNA, 80 bp, synthetic construct
  misc_feature 1..80: note = Synthetic: >GCS_019_7-cand-240-319
  source 1..80: mol_type = other DNA
acactgtttttgactcacgtggtaaatccatgtatgacggcgaccggtatttggcacacgatttgtccactcttgctgtt

SEQ ID NO: 17335 - DNA, 80 bp, synthetic construct
  misc_feature 1..80: note = Synthetic: >GCS_019_7-cand-340-419
  source 1..80: mol_type = other DNA
tggctacactgctcataatattacacagagtgttgttgtgaaaccagaacctacagttatggaacgtattgacaaaggtg

SEQ ID NO: 17336 - DNA, 80 bp, synthetic construct
  misc_feature 1..80: note = Synthetic: >GCS_019_8-cand-300-379
  source 1..80: mol_type = other DNA
atgattaaacttgtcgtagggaatacgactgtttatatgagtgttgtccctaatgagcttgatcctgcattcagcaagaa

SEQ ID NO: 17337 - DNA, 80 bp, synthetic construct
  misc_feature 1..80: note = Synthetic: >GCS_019_8-cand-390-469
  source 1..80: mol_type = other DNA
tgtgcacataagcttaataggttgaagctctgctttgtcactaatttaccaccttcttgtgcgcttagaggcctgttgtc

SEQ ID NO: 17338 - DNA, 80 bp, synthetic construct
  misc_feature 1..80: note = Synthetic: >GCS_019_8-cand-570-649
  source 1..80: mol_type = other DNA
gttaacgtcaaggatgttgtcgttgacacttcacaatcctaccagtctcagattggtgttgtctcggacggcaaagatgt

SEQ ID NO: 17339 - DNA, 80 bp, synthetic construct
  misc_feature 1..80: note = Synthetic: >GCS_019_9-cand-100-179
  source 1..80: mol_type = other DNA
tctagagtgcttgttttggctgctaaagtgctgattgtgtttgtgtacgtacccatactcttgtggtttggtgcgtatgt

SEQ ID NO: 17340 - DNA, 80 bp, synthetic construct
  misc_feature 1..80: note = Synthetic: >GCS_019_9-cand-370-449
  source 1..80: mol_type = other DNA
tatgttgcttatggtggtcacactgtcgcatttgcttctgataatgaactttacgtcgctatcagaggaagtgtggaaaa

SEQ ID NO: 17341 - DNA, 80 bp, synthetic construct
  misc_feature 1..80: note = Synthetic: >GCS_019_9-cand-460-539
  source 1..80: mol_type = other DNA
ctaatgcgtaagatcgaaatgtacaatggcaatgctctttttgtttttgctgaggagcccgttgtgggcatcgtcaacac

SEQ ID NO: 17342 - DNA, 80 bp, synthetic construct
  misc_feature 1..80: note = Synthetic: >GCS_019_9-cand-900-979
  source 1..80: mol_type = other DNA
atcgtgatcttgcagtatgggcactggaaatacagtcgtgtgctgtatgctcttaaaatgctcgtactgtggctgttgtg

SEQ ID NO: 17343 - DNA, 80 bp, synthetic construct
  misc_feature 1..80: note = Synthetic: >GCS_242_1-cand-0-79
  source 1..80: mol_type = other DNA
tattagagtggatgctgacacattggataatcccatttttgccgcttttatagctaatttagagtgtgatcctaagactc

SEQ ID NO: 17344 - DNA, 80 bp, synthetic construct
  misc_feature 1..80: note = Synthetic: >GCS_242_1-cand-110-189
  source 1..80: mol_type = other DNA
ggctttgtctagctaacaagattatgttgggtgacaagccactccccacagatgaattccacccctttatagtaggctta

SEQ ID NO: 17345 - DNA, 80 bp, synthetic construct
  misc_feature 1..80: note = Synthetic: >GCS_242_2-cand-0-79
  source 1..80: mol_type = other DNA
gtatgaatttatataatctagtgcgagatgcattgcgtcctagttacgcaaccatctcccctagtgtggatgaccctagg

SEQ ID NO: 17346 - DNA, 80 bp, synthetic construct
  misc_feature 1..80: note = Synthetic: >GCS_242_2-cand-100-179
  source 1..80: mol_type = other DNA
cctctcgtgttatgcaaccctatcagtgttgctgtattacttacagcgtgtgaaacagccttatcttagtatgttgtttc

SEQ ID NO: 17347 - DNA, 80 bp, synthetic construct
  misc_feature 1..80: note = Synthetic: >GCS_242_2-cand-230-309
  source 1..80: mol_type = other DNA
tcagccaatttttatgttagcttgtttgcccagtgcatacttttggtttgtgcccttggctgttttctagaacgtaccat

SEQ ID NO: 17348 - DNA, 80 bp, synthetic construct
  misc_feature 1..80: note = Synthetic: >GCS_242_2-cand-310-389
  source 1..80: mol_type = other DNA
actctccattaagctcaggtcaatggcaccttttatgtctatggctgataatttcgctataattaagactacgtgtaaca

SEQ ID NO: 17349 - DNA, 80 bp, synthetic construct
  misc_feature 1..80: note = Synthetic: >GCS_242_3-cand-0-79
  source 1..80: mol_type = other DNA
agtacgcatgtcgttatgtgtgcggacttccgtcatattaaatacactgatgttggccgtactttcaggattaggttttc

SEQ ID NO: 17350 - DNA, 80 bp, synthetic construct
  misc_feature 1..80: note = Synthetic: >GCS_242_3-cand-90-169
  source 1..80: mol_type = other DNA
tgctcctgggaaaatatgagtccagctgacgtcgtgtttcttggtagccacactttgcaatttactgttttaggtgtttg

SEQ ID NO: 17351 - DNA, 80 bp, synthetic construct
  misc_feature 1..80: note = Synthetic: >GCS_242_3-cand-160-239
  source 1..80: mol_type = other DNA
taggtgtttgctttgataatgaagttgttggtggctgccagaatattcatgagccctgcccagaacgccatacggtgttt

SEQ ID NO: 17352 - DNA, 80 bp, synthetic construct
  misc_feature 1..80: note = Synthetic: >GCS_242_3-cand-250-329
  source 1..80: mol_type = other DNA
gcgatgatataacattgcttgagctatgtgttcaggcagcagggtttggcacccaggatgttggtgtcaaatatgatttc

SEQ ID NO: 17353 - DNA, 80 bp, synthetic construct
  misc_feature 1..80: note = Synthetic: >GCS_242_3-cand-340-419
  source 1..80: mol_type = other DNA
ataaaaattgtttgcggtataaacgtacactacctccgcatgaggttatagatgaagattactgaacgaacatggaccct

SEQ ID NO: 17354 - DNA, 80 bp, synthetic construct
  misc_feature 1..80: note = Synthetic: >GCS_242_3-cand-430-509
  source 1..80: mol_type = other DNA
atgcactagctgccaatgttcttttgaacatttgccagcagatgcataccgacattcatcagcatgggttccacgtctca

SEQ ID NO: 17355 - DNA, 80 bp, synthetic construct
  misc_feature 1..80: note = Synthetic: >GCS_242_3-cand-640-719
  source 1..80: mol_type = other DNA
aactggaagtcactgttggtaatttgcgtaccttacttgttatggtgcgtactattatgcagtacgacacttcacgtacc

SEQ ID NO: 17356 - DNA, 80 bp, synthetic construct
  misc_feature 1..80: note = Synthetic: >GCS_242_4-cand-0-79
  source 1..80: mol_type = other DNA
taatactacctctttggttgttaacgtggttaatttgttattaccggatccttatatagcctattccggtcagacattac

SEQ ID NO: 17357 - DNA, 80 bp, synthetic construct
  misc_feature 1..80: note = Synthetic: >GCS_242_4-cand-80-159
  source 1..80: mol_type = other DNA
gacaaaatttatttatggctgatttgtctcgcactatgatttatcccataacacctccccctagggatggtaatggtggt

SEQ ID NO: 17358 - DNA, 80 bp, synthetic construct
  misc_feature 1..80: note = Synthetic: >GCS_242_4-cand-170-249
  source 1..80: mol_type = other DNA
ataccactattctgcctgttgtatctggtctgtttgtgcacacgtggatgtacaggcaagactcagcttctacgaagtat

SEQ ID NO: 17359 - DNA, 80 bp, synthetic construct
  misc_feature 1..80: note = Synthetic: >GCS_242_4-cand-260-339
  source 1..80: mol_type = other DNA
cttttggtgttgcatttggtgatacttttatccaggatcgtgttgctatagttgttatagctcctgataagttaggttcc

SEQ ID NO: 17360 - DNA, 80 bp, synthetic construct
  misc_feature 1..80: note = Synthetic: >GCS_242_4-cand-350-429
  source 1..80: mol_type = other DNA
ctgcgtatcgtagcgtaactactgtacacttagttgtgtgcagtaatgctaccttgtgtattaaccctggtttcaatagg

SEQ ID NO: 17361 - DNA, 80 bp, synthetic construct
  misc_feature 1..80: note = Synthetic: >GCS_242_4-cand-430-509
  source 1..80: mol_type = other DNA
tggggaccagctggtaatattatagcttccaatgcactcgtcgatcactcgaactcgtgctttgtgaataattcctttaa

SEQ ID NO: 17362 - DNA, 80 bp, synthetic construct
  misc_feature 1..80: note = Synthetic: >GCS_242_4-cand-520-599
  source 1..80: mol_type = other DNA
agtactagtagaattaatcttgcttttctttttaaggatggtgatcttttgatctaccactctaattggttgccgaaggg

SEQ ID NO: 17363 - DNA, 80 bp, synthetic construct
  misc_feature 1..80: note = Synthetic: >GCS_242_4-cand-600-679
  source 1..80: mol_type = other DNA
tagctttgattttaatcagagctttcctttacaatattttatgactttgccggttggcggcaatttgccgcgagctcagt

SEQ ID NO: 17364 - DNA, 80 bp, synthetic construct
  misc_feature 1..80: note = Synthetic: >GCS_242_4-cand-680-759
  source 1..80: mol_type = other DNA
ttttccagtctatagtcaggcagggtggtactacaattggtgcagacgataagtgtactgattttaatattaatttgcat

SEQ ID NO: 17365 - DNA, 80 bp, synthetic construct
  misc_feature 1..80: note = Synthetic: >GCS_242_4-cand-770-849
  source 1..80: mol_type = other DNA
tagttaatagggatttgttagtttcttattttaataatggcagcgtcgctaatgcagctgattgtgctgatagtgcttcg

SEQ ID NO: 17366 - DNA, 80 bp, synthetic construct
  misc_feature 1..80: note = Synthetic: >GCS_242_4-cand-850-929
  source 1..80: mol_type = other DNA
caggagttatactgtgttacaggttcctttcaaccacctactggtgtataccctctaagtaggtatcgtgcacaggtaga

SEQ ID NO: 17367 - DNA, 80 bp, synthetic construct
  misc_feature 1..80: note = Synthetic: >GCS_242_4-cand-930-1009
  source 1..80: mol_type = other DNA
tggttttgtacgtgttactcagcgaggcgaccattgtcggcctccctacactgtcctccaagacccaccacaaccagtag

SEQ ID NO: 17368 - DNA, 80 bp, synthetic construct
  misc_feature 1..80: note = Synthetic: >GCS_242_4-cand-1010-1089
  source 1..80: mol_type = other DNA
tgtggcgtcggtatatgctttatgattgtgcatttgactttagtgtcgttattgataatttgcctacacaccagttgcag

SEQ ID NO: 17369 - DNA, 80 bp, synthetic construct
  misc_feature 1..80: note = Synthetic: >GCS_242_4-cand-1090-1169
  source 1..80: mol_type = other DNA
tgttacggcatatcacctaggcgcctggcatctatgtgctatagtagtgttactatagatgtcatgcgtattaatgctac

SEQ ID NO: 17370 - DNA, 80 bp, synthetic construct
  misc_feature 1..80: note = Synthetic: >GCS_242_4-cand-1160-1239
  source 1..80: mol_type = other DNA
ttaatgctacgcacttgaataatttattaaatcgtgtgcctgattctttcagtttgtataattatgctgttccggacaac

SEQ ID NO: 17371 - DNA, 80 bp, synthetic construct
  misc_feature 1..80: note = Synthetic: >GCS_242_4-cand-1240-1319
  source 1..80: mol_type = other DNA
ttttatggttgcttacatgcattttatttgaatagcactactgcttatgctgtggcgaatcaatttcccattaagccggg

SEQ ID NO: 17372 - DNA, 80 bp, synthetic construct
  misc_feature 1..80: note = Synthetic: >GCS_242_4-cand-1320-1399
  source 1..80: mol_type = other DNA
cggtcggcagagtaatagtgcttatatagcgacagtgcttaacgcagcgaactataatacattttctcgtatttatggtt

SEQ ID NO: 17373 - DNA, 80 bp, synthetic construct
  misc_feature 1..80: note = Synthetic: >GCS_242_4-cand-1400-1479
  source 1..80: mol_type = other DNA
tagctgttataacgcttaaacctgcttccggtaataaattggtctgtccagtagctaatgatactgctgttataacggat

SEQ ID NO: 17374 - DNA, 80 bp, synthetic construct
  misc_feature 1..80: note = Synthetic: >GCS_242_4-cand-1490-1569
  source 1..80: mol_type = other DNA
agtatagtctttatggctatacgggcactggcgtgttatctacaaacacgtctcttaccgtacctaagggtaaggttttt

SEQ ID NO: 17375 - DNA, 80 bp, synthetic construct
  misc_feature 1..80: note = Synthetic: >GCS_242_4-cand-1570-1649
  source 1..80: mol_type = other DNA
acagcatctagtactggtgctattataggtgtgtctattaatggcacgatgtacagtattacgccgtgtgttactgtgcc

SEQ ID NO: 17376 - DNA, 80 bp, synthetic construct
  misc_feature 1..80: note = Synthetic: >GCS_242_4-cand-1650-1729
  source 1..80: mol_type = other DNA
tgtgtccgtaggttatcatgccaattatgagcgtgttttattatttaatggtttgtcctgctctcagcgttcgcgtgctg

SEQ ID NO: 17377 - DNA, 80 bp, synthetic construct
  misc_feature 1..80: note = Synthetic: >GCS_242_4-cand-1730-1809
  source 1..80: mol_type = other DNA
tgtctcaaccaacctctacattatggagcttgtccgtgtcggatggatccgctatagacacgctatcagggtgtgttgta

SEQ ID NO: 17378 - DNA, 80 bp, synthetic construct
  misc_feature 1..80: note = Synthetic: >GCS_242_4-cand-1810-1889
  source 1..80: mol_type = other DNA
aatgcaattttgcgtaatgatactactgttagtacatgcgctatgcctttaggcaacagtttatgtcttattaatgacac

SEQ ID NO: 17379 - DNA, 80 bp, synthetic construct
  misc_feature 1..80: note = Synthetic: >GCS_264a_1-cand-0-79
  source 1..80: mol_type = other DNA
acatggatggtggtcttcacctttgttggagtctaccaatcattgtggcccgtcctgagttacttcttaaagtagctcgt

SEQ ID NO: 17380 - DNA, 80 bp, synthetic construct
  misc_feature 1..80: note = Synthetic: >GCS_264a_1-cand-80-159
  source 1..80: mol_type = other DNA
gcgttacctgtaacgtctactaacatctttgcatttttatgtttatgctacgcgctgttatgcacaaaaccaactcgtgt

SEQ ID NO: 17381 - DNA, 80 bp, synthetic construct
  misc_feature 1..80: note = Synthetic: >GCS_264a_10-cand-0-79
  source 1..80: mol_type = other DNA
tatggatgggtacccctgcgagacatgggttctgttgtttgttcttgtaaggctgaacatcaacttacatcttcatgtat

SEQ ID NO: 17382 - DNA, 80 bp, synthetic construct
  misc_feature 1..80: note = Synthetic: >GCS_264a_10-cand-180-259
  source 1..80: mol_type = other DNA
tttggcggagctatttggtcacctattggtgccgtcaacaatgtaactgtgtgggttccacgcatttactctgatttaac

SEQ ID NO: 17383 - DNA, 80 bp, synthetic construct
  misc_feature 1..80: note = Synthetic: >GCS_264a_10-cand-260-339
  source 1..80: mol_type = other DNA
agacaaccatactggtgcagttggtactggtaatattaagttgttgaattctgaaattaagactttccttgttgagggtt

SEQ ID NO: 17384 - DNA, 80 bp, synthetic construct
  misc_feature 1..80: note = Synthetic: >GCS_264a_10-cand-580-659
  source 1..80: mol_type = other DNA
ctgctatgcgtacatttgtgcgcaaagaagaagagaaaatgcgcattttctgtaaaaatgttaatgccgctctatcctcg

SEQ ID NO: 17385 - DNA, 80 bp, synthetic construct
  misc_feature 1..80: note = Synthetic: >GCS_264a_10-cand-660-739
  source 1..80: mol_type = other DNA
gctgcgagaatagcctatgacagaggaattgtttcactgttcacaggttatcaaattttagaggcttttgtcaccaaaac

SEQ ID NO: 17386 - DNA, 80 bp, synthetic construct
  misc_feature 1..80: note = Synthetic: >GCS_264a_10-cand-740-819
  source 1..80: mol_type = other DNA
acaagtttgcgtcggtgacacattagccgttgttgcagcgattttgaaacctactgtagagtgggttttgaataagatga

SEQ ID NO: 17387 - DNA, 80 bp, synthetic construct
  misc_feature 1..80: note = Synthetic: >GCS_264a_10-cand-820-899
  source 1..80: mol_type = other DNA
ctttggtgaaaaacacctggatttgttatgcagaggctcttttagcgcttttcaaggcacaatttactttgattaaaggt

SEQ ID NO: 17388 - DNA, 80 bp, synthetic construct
  misc_feature 1..80: note = Synthetic: >GCS_264a_10-cand-900-979
  source 1..80: mol_type = other DNA
aaatttttctttcttaaggaagccttgaataagccttgcggtgctttgcgtgacttacttgccgtggtgctcactaaatt

SEQ ID NO: 17389 - DNA, 80 bp, synthetic construct
  misc_feature 1..80: note = Synthetic: >GCS_264a_10-cand-980-1059
  source 1..80: mol_type = other DNA
gttaactactgcaagatgggctggatgtaaagtagaagcactctatgtagatggttactactacttttccaactgtggat

SEQ ID NO: 17390 - DNA, 80 bp, synthetic construct
  misc_feature 1..80: note = Synthetic: >GCS_264a_10-cand-1060-1139
  source 1..80: mol_type = other DNA
tattggcagaaactcaggtttgtgctaaatctcttggtgtattgttaacacctaaacaacagaaaatggaagtagaagtt

SEQ ID NO: 17391 - DNA, 80 bp, synthetic construct
  misc_feature 1..80: note = Synthetic: >GCS_264a_10-cand-1140-1219
  source 1..80: mol_type = other DNA
ttgcaaggtgcttatgatgcaccggttgatttaactactgatgaattggaagatgccagtggtactcttgaagaagtctt

SEQ ID NO: 17392 - DNA, 80 bp, synthetic construct
  misc_feature 1..80: note = Synthetic: >GCS_264a_10-cand-1220-1299
  source 1..80: mol_type = other DNA
tgggtcttccgatctagcacttgtaaaaggtagtttagttactatggctagtaaggtatttgtgcgtacagaggatggta

SEQ ID NO: 17393 - DNA, 80 bp, synthetic construct
  misc_feature 1..80: note = Synthetic: >GCS_264a_10-cand-1310-1389
  source 1..80: mol_type = other DNA
ctatgtccgtgagggaggtgtattgcttaaaccttttagactacgtggtggaggtacacctaaagtaacttttggtgatg

SEQ ID NO: 17394 - DNA, 80 bp, synthetic construct
  misc_feature 1..80: note = Synthetic: >GCS_264a_2-cand-0-79
  source 1..80: mol_type = other DNA
cactggtactggacgctatggtgacatgcgttatggcactaagaaccctgatctaatctgggttggagaggaaggtgcta

SEQ ID NO: 17395 - DNA, 80 bp, synthetic construct
  misc_feature 1..80: note = Synthetic: >GCS_264a_2-cand-100-179
  source 1..80: mol_type = other DNA
atgggcacgcgtaaccccaataatgatggtgccatttctgtgcagttacatgatggcattcctaaaggcttctatgcaga

SEQ ID NO: 17396 - DNA, 80 bp, synthetic construct
  misc_feature 1..80: note = Synthetic: >GCS_264a_2-cand-220-299
  source 1..80: mol_type = other DNA
aactccagtagagcttcttcgcagggcaactcacgtgcaggctctagaaatgtgtctcctggccgtaatacacctaatgt

SEQ ID NO: 17397 - DNA, 80 bp, synthetic construct
  misc_feature 1..80: note = Synthetic: >GCS_264a_2-cand-300-379
  source 1..80: mol_type = other DNA
tgctccaaatacagagccatggatggcttatttagtccagaaattggaagcattggagaccaaagttaatggtcctaagg

SEQ ID NO: 17398 - DNA, 80 bp, synthetic construct
  misc_feature 1..80: note = Synthetic: >GCS_264a_3-cand-70-149
  source 1..80: mol_type = other DNA
caattagccacacttactgatgtcgttaatcagctgaataagtctttcatagaccttaagcagatgaatgtttacgagca

SEQ ID NO: 17399 - DNA, 80 bp, synthetic construct
  misc_feature 1..80: note = Synthetic: >GCS_264a_3-cand-230-309
  source 1..80: mol_type = other DNA
tttgcatgacaaactgctgttcttgttttaaaggactttgttcttgcaggcattgttcctatgatgaaattgaagatgta

SEQ ID NO: 17400 - DNA, 80 bp, synthetic construct
  misc_feature 1..80: note = Synthetic: >GCS_264a_3-cand-330-409
  source 1..80: mol_type = other DNA
taataaacgaacagaatgaatatttataacctcatagtagatgcatttagcattcctactacaatgtcacctgaggatgc

SEQ ID NO: 17401 - DNA, 80 bp, synthetic construct
  misc_feature 1..80: note = Synthetic: >GCS_264a_4-cand-410-489
  source 1..80: mol_type = other DNA
atttgctttgtttgaaagaatttacattgactgatctgcaaaccttttatgtagaaggaactcaaccttttgtactgctt

SEQ ID NO: 17402 - DNA, 80 bp, synthetic construct
  misc_feature 1..80: note = Synthetic: >GCS_264a_4-cand-500-579
  source 1..80: mol_type = other DNA
acttgagtaaagtgttaggtctgcaagtgagtgatacccaacttaggattaataagttgagtaagactgttgtttgtact

SEQ ID NO: 17403 - DNA, 80 bp, synthetic construct
  misc_feature 1..80: note = Synthetic: >GCS_264a_5-cand-100-179
  source 1..80: mol_type = other DNA
tctccaccatggaggtggtgttgcgggtgcgttaaatcgtgccactaacaatgagatgcaaaaagagtcatcagctttta

SEQ ID NO: 17404 - DNA, 80 bp, synthetic construct
  misc_feature 1..80: note = Synthetic: >GCS_264a_5-cand-310-389
  source 1..80: mol_type = other DNA
agtttatgctgcatataaaggttatgatagtgttcttacacctttgatatctgctggcatctttggctactctgtagaag

SEQ ID NO: 17405 - DNA, 80 bp, synthetic construct
  misc_feature 1..80: note = Synthetic: >GCS_264a_5-cand-410-489
  source 1..80: mol_type = other DNA
gccaacgtcaactcagatacttatgtagtggtttatgacaaacaactctatgatagagctcgtgatgtggatcttacacc

SEQ ID NO: 17406 - DNA, 80 bp, synthetic construct
  misc_feature 1..80: note = Synthetic: >GCS_264a_5-cand-510-589
  source 1..80: mol_type = other DNA
gggcagaagctgtagatgcacaagaggctagtcttaacttacctctagaagatgttgagactgaggtagctgcatgtgtt

SEQ ID NO: 17407 - DNA, 80 bp, synthetic construct
  misc_feature 1..80: note = Synthetic: >GCS_264a_5-cand-610-689
  source 1..80: mol_type = other DNA
tgttaaaagggtcaagaaagatttaaaaattaaacttgaacctgatgtggtgccagttgtagaaataattccacaacata

SEQ ID NO: 17408 - DNA, 80 bp, synthetic construct
  misc_feature 1..80: note = Synthetic: >GCS_264a_6-cand-0-79
  source 1..80: mol_type = other DNA
tgaaacagagcatttattatgctgacaccactaatgtgactgtatatccagtcacgccatataagagtaataaccaagct

SEQ ID NO: 17409 - DNA, 80 bp, synthetic construct
  misc_feature 1..80: note = Synthetic: >GCS_264a_6-cand-90-169
  source 1..80: mol_type = other DNA
acaccactcaggtgttagtaggcaatggtttatttgttcacacatatatgtatagagagcaatcttctagtacatattgt

SEQ ID NO: 17410 - DNA, 80 bp, synthetic construct
  misc_feature 1..80: note = Synthetic: >GCS_264a_6-cand-240-319
  source 1..80: mol_type = other DNA
ctggcaatttaggatcttggcctactgttagtaaacctacaactactaaggtttatattatagtgtgtagcaatgctaca

SEQ ID NO: 17411 - DNA, 80 bp, synthetic construct
  misc_feature 1..80: note = Synthetic: >GCS_264a_6-cand-330-409
  source 1..80: mol_type = other DNA
atccagcctttaatagatggggtccagcaggtcaattttatgcagacgatgcatttgttaaccacggtgactcctgtttt

SEQ ID NO: 17412 - DNA, 80 bp, synthetic construct
  misc_feature 1..80: note = Synthetic: >GCS_264a_6-cand-420-499
  source 1..80: mol_type = other DNA
cctttgacatccctcttaatacgtcccgtattaatttggctttccggtttaatgatggcaatttgcttctttatcactcg

SEQ ID NO: 17413 - DNA, 80 bp, synthetic construct
  misc_feature 1..80: note = Synthetic: >GCS_264a_6-cand-510-589
  source 1..80: mol_type = other DNA
ctacatcaggcttaaatcttcttgaagatactccactacatttttatatgagtgtaggtgtaggtgctaacctacccaac

SEQ ID NO: 17414 - DNA, 80 bp, synthetic construct
  misc_feature 1..80: note = Synthetic: >GCS_264a_6-cand-600-679
  source 1..80: mol_type = other DNA
tccagtctttaagtagatcgctagatagtagtggtgatggacaatgtttggctgcacagaataacttatatatagcacca

SEQ ID NO: 17415 - DNA, 80 bp, synthetic construct
  misc_feature 1..80: note = Synthetic: >GCS_264a_7-cand-0-79
  source 1..80: mol_type = other DNA
tattgacatactagttaatggtgtgtcagattgggatgtaatacaaactacatgtattgtagatcgttgtgtttacaaaa

SEQ ID NO: 17416 - DNA, 80 bp, synthetic construct
  misc_feature 1..80: note = Synthetic: >GCS_264a_7-cand-90-169
  source 1..80: mol_type = other DNA
gcgtaacaacacttacatgtgttatgatgatactaacctgtatgctattacaggtaatactgtgcttaagttctcaactg

SEQ ID NO: 17417 - DNA, 80 bp, synthetic construct
  misc_feature 1..80: note = Synthetic: >GCS_264a_7-cand-300-379
  source 1..80: mol_type = other DNA
agttggtactgtttttgttgatggtgttgattactctaaccgtaaacctaaatctagtgatgaaggtatacacctcttta

SEQ ID NO: 17418 - DNA, 80 bp, synthetic construct
  misc_feature 1..80: note = Synthetic: >GCS_264a_7-cand-390-469
  source 1..80: mol_type = other DNA
cttttcgcctgaagagttatatgctatgcaagagtactatggtgttccagatgtagacattattgcacgtaccatgagta

SEQ ID NO: 17419 - DNA, 80 bp, synthetic construct
  misc_feature 1..80: note = Synthetic: >GCS_264a_7-cand-480-559
  source 1..80: mol_type = other DNA
tgtaaaaacttggccttttacagttttagatggtagagttttgttagcacaacgtgactctaattgttatgtaaatgcgg

SEQ ID NO: 17420 - DNA, 80 bp, synthetic construct
  misc_feature 1..80: note = Synthetic: >GCS_264a_7-cand-570-649
  source 1..80: mol_type = other DNA
tttgcaggatgttgatataacctttataacaccttgggttgctcgtgcttatgaagctcttaaaggaggtaatcctttgc

SEQ ID NO: 17421 - DNA, 80 bp, synthetic construct
  misc_feature 1..80: note = Synthetic: >GCS_264a_8-cand-0-79
  source 1..80: mol_type = other DNA
agttattagtcttaaaccagcttcaggtagtcatttggtatgtcccaccaataatgacacagatgttgtggaaaatcagt

SEQ ID NO: 17422 - DNA, 80 bp, synthetic construct
  misc_feature 1..80: note = Synthetic: >GCS_264a_8-cand-630-709
  source 1..80: mol_type = other DNA
tgctggtactgaatatattcagactacctcaccaaagattaatatagactgtgctaaatatctttgtggtgattcagata

SEQ ID NO: 17423 - DNA, 80 bp, synthetic construct
  misc_feature 1..80: note = Synthetic: >GCS_264a_8-cand-720-799
  source 1..80: mol_type = other DNA
agttctattacaatatggaactttttgtgacgacgtgaataaggcattagctgaggttagctcagttattgattctacta

SEQ ID NO: 17424 - DNA, 80 bp, synthetic construct
  misc_feature 1..80: note = Synthetic: >GCS_264a_8-cand-1110-1189
  source 1..80: mol_type = other DNA
cacgtcattgcttgtgggtgctgttgcttctgctgggtatacatttggtatcacatctgtaggtgttataccatttgcaa

SEQ ID NO: 17425 - DNA, 80 bp, synthetic construct
  misc_feature 1..80: note = Synthetic: >GCS_264a_9-cand-0-79
  source 1..80: mol_type = other DNA
cagtggaacctaaaaaggataaaaagaagaaggaagaagccagttcagctactgttgctgtttatgaggatgcctcaact

SEQ ID NO: 17426 - DNA, 80 bp, synthetic construct
  misc_feature 1..80: note = Synthetic: >GCS_264a_9-cand-90-169
  source 1..80: mol_type = other DNA
aacccgttgtgaaagtatgggttaaagatgatggtgtccagaccgatgatgaatggatcggtggtgatgatactgtctat

SEQ ID NO: 17427 - DNA, 80 bp, synthetic construct
  misc_feature 1..80: note = Synthetic: >GCS_264a_9-cand-180-259
  source 1..80: mol_type = other DNA
atgacaaacccaaagctcagagaagacacaagaagagggcctccacagcttcacgtgtgactgttgcagaccctactaat

SEQ ID NO: 17428 - DNA, 80 bp, synthetic construct
  misc_feature 1..80: note = Synthetic: >GCS_264a_9-cand-360-439
  source 1..80: mol_type = other DNA
gtttacattgattgtgcgcactcagtctttatgtgtcgagtctgaaaactataattattgcagaggtttgttaacacctt

SEQ ID NO: 17429 - DNA, 80 bp, synthetic construct
  misc_feature 1..80: note = Synthetic: >GCS_264a_9-cand-920-999
  source 1..80: mol_type = other DNA
ttaggttgtggtttgaacgaacatgaatgttttagcaattctatgctttctatctctcttctctccattgctagggcaat

SEQ ID NO: 17430 - DNA, 80 bp, synthetic construct; identical to SEQ ID NO: 17379
  misc_feature 1..80: note = Synthetic: >GCS_264b_1-cand-0-79
  source 1..80: mol_type = other DNA

SEQ ID NO: 17431 - DNA, 80 bp, synthetic construct; identical to SEQ ID NO: 17380
  misc_feature 1..80: note = Synthetic: >GCS_264b_1-cand-80-159
  source 1..80: mol_type = other DNA

SEQ ID NO: 17432 - DNA, 80 bp, synthetic construct; identical to SEQ ID NO: 17381
  misc_feature 1..80: note = Synthetic: >GCS_264b_10-cand-0-79
  source 1..80: mol_type = other DNA

SEQ ID NO: 17433 - DNA, 80 bp, synthetic construct; identical to SEQ ID NO: 17382
  misc_feature 1..80: note = Synthetic: >GCS_264b_10-cand-180-259
  source 1..80: mol_type = other DNA

SEQ ID NO: 17434 - DNA, 80 bp, synthetic construct; identical to SEQ ID NO: 17383
  misc_feature 1..80: note = Synthetic: >GCS_264b_10-cand-260-339
  source 1..80: mol_type = other DNA

SEQ ID NO: 17435 - DNA, 80 bp, synthetic construct; identical to SEQ ID NO: 17384
  misc_feature 1..80: note = Synthetic: >GCS_264b_10-cand-580-659
  source 1..80: mol_type = other DNA

SEQ ID NO: 17436 - DNA, 80 bp, synthetic construct; identical to SEQ ID NO: 17385
  misc_feature 1..80: note = Synthetic: >GCS_264b_10-cand-660-739
  source 1..80: mol_type = other DNA

SEQ ID NO: 17437 - DNA, 80 bp, synthetic construct; identical to SEQ ID NO: 17386
  misc_feature 1..80: note = Synthetic: >GCS_264b_10-cand-740-819
  source 1..80: mol_type = other DNA

SEQ ID NO: 17438 - DNA, 80 bp, synthetic construct; identical to SEQ ID NO: 17387
  misc_feature 1..80: note = Synthetic: >GCS_264b_10-cand-820-899
  source 1..80: mol_type = other DNA

SEQ ID NO: 17439 - DNA, 80 bp, synthetic construct; identical to SEQ ID NO: 17388
  misc_feature 1..80: note = Synthetic: >GCS_264b_10-cand-900-979
  source 1..80: mol_type = other DNA

SEQ ID NO: 17440 - DNA, 80 bp, synthetic construct; identical to SEQ ID NO: 17389
  misc_feature 1..80: note = Synthetic: >GCS_264b_10-cand-980-1059
  source 1..80: mol_type = other DNA

SEQ ID NO: 17441 - DNA, 80 bp, synthetic construct; identical to SEQ ID NO: 17390
  misc_feature 1..80: note = Synthetic: >GCS_264b_10-cand-1060-1139
  source 1..80: mol_type = other DNA

SEQ ID NO: 17442 - DNA, 80 bp, synthetic construct; identical to SEQ ID NO: 17391
  misc_feature 1..80: note = Synthetic: >GCS_264b_10-cand-1140-1219
  source 1..80: mol_type = other DNA

SEQ ID NO: 17443 - DNA, 80 bp, synthetic construct; identical to SEQ ID NO: 17392
  misc_feature 1..80: note = Synthetic: >GCS_264b_10-cand-1220-1299
  source 1..80: mol_type = other DNA

SEQ ID NO: 17444 - DNA, 80 bp, synthetic construct; identical to SEQ ID NO: 17393
  misc_feature 1..80: note = Synthetic: >GCS_264b_10-cand-1310-1389
  source 1..80: mol_type = other DNA

SEQ ID NO: 17445 - DNA, 80 bp, synthetic construct; identical to SEQ ID NO: 17394
  misc_feature 1..80: note = Synthetic: >GCS_264b_2-cand-0-79
  source 1..80: mol_type = other DNA

SEQ ID NO: 17446 - DNA, 80 bp, synthetic construct; identical to SEQ ID NO: 17395
  misc_feature 1..80: note = Synthetic: >GCS_264b_2-cand-100-179
  source 1..80: mol_type = other DNA

SEQ ID NO: 17447 - DNA, 80 bp, synthetic construct; identical to SEQ ID NO: 17396
  misc_feature 1..80: note = Synthetic: >GCS_264b_2-cand-220-299
  source 1..80: mol_type = other DNA

SEQ ID NO: 17448 - DNA, 80 bp, synthetic construct; identical to SEQ ID NO: 17397
  misc_feature 1..80: note = Synthetic: >GCS_264b_2-cand-300-379
  source 1..80: mol_type = other DNA

SEQ ID NO: 17449 - DNA, 80 bp, synthetic construct; identical to SEQ ID NO: 17398
  misc_feature 1..80: note = Synthetic: >GCS_264b_3-cand-70-149
  source 1..80: mol_type = other DNA

SEQ ID NO: 17450 - DNA, 80 bp, synthetic construct; identical to SEQ ID NO: 17399
  misc_feature 1..80: note = Synthetic: >GCS_264b_3-cand-230-309
  source 1..80: mol_type = other DNA

SEQ ID NO: 17451 - DNA, 80 bp, synthetic construct; identical to SEQ ID NO: 17400
  misc_feature 1..80: note = Synthetic: >GCS_264b_3-cand-330-409
  source 1..80: mol_type = other DNA

SEQ ID NO: 17452 - DNA, 80 bp, synthetic construct; identical to SEQ ID NO: 17401
  misc_feature 1..80: note = Synthetic: >GCS_264b_4-cand-410-489
  source 1..80: mol_type = other DNA

SEQ ID NO: 17453 - DNA, 80 bp, synthetic construct; identical to SEQ ID NO: 17402
  misc_feature 1..80: note = Synthetic: >GCS_264b_4-cand-500-579
  source 1..80: mol_type = other DNA

SEQ ID NO: 17454 - DNA, 80 bp, synthetic construct; identical to SEQ ID NO: 17403
  misc_feature 1..80: note = Synthetic: >GCS_264b_5-cand-100-179
  source 1..80: mol_type = other DNA

SEQ ID NO: 17455 - DNA, 80 bp, synthetic construct; identical to SEQ ID NO: 17404
  misc_feature 1..80: note = Synthetic: >GCS_264b_5-cand-310-389
  source 1..80: mol_type = other DNA

SEQ ID NO: 17456 - DNA, 80 bp, synthetic construct; identical to SEQ ID NO: 17405
  misc_feature 1..80: note = Synthetic: >GCS_264b_5-cand-410-489
  source 1..80: mol_type = other DNA

SEQ ID NO: 17457 - DNA, 80 bp, synthetic construct; identical to SEQ ID NO: 17406
  misc_feature 1..80: note = Synthetic: >GCS_264b_5-cand-510-589
  source 1..80: mol_type = other DNA

SEQ ID NO: 17458 - DNA, 80 bp, synthetic construct; identical to SEQ ID NO: 17407
  misc_feature 1..80: note = Synthetic: >GCS_264b_5-cand-610-689
  source 1..80: mol_type = other DNA

SEQ ID NO: 17459 - DNA, 80 bp, synthetic construct; identical to SEQ ID NO: 17408
  misc_feature 1..80: note = Synthetic: >GCS_264b_6-cand-0-79
  source 1..80: mol_type = other DNA

SEQ ID NO: 17460 - DNA, 80 bp, synthetic construct; identical to SEQ ID NO: 17409
  misc_feature 1..80: note = Synthetic: >GCS_264b_6-cand-90-169
  source 1..80: mol_type = other DNA

SEQ ID NO: 17461 - DNA, 80 bp, synthetic construct; identical to SEQ ID NO: 17410
  misc_feature 1..80: note = Synthetic: >GCS_264b_6-cand-240-319
  source 1..80: mol_type = other DNA

SEQ ID NO: 17462 - DNA, 80 bp, synthetic construct; identical to SEQ ID NO: 17411
  misc_feature 1..80: note = Synthetic: >GCS_264b_6-cand-330-409
  source 1..80: mol_type = other DNA

SEQ ID NO: 17463 - DNA, 80 bp, synthetic construct; identical to SEQ ID NO: 17412
  misc_feature 1..80: note = Synthetic: >GCS_264b_6-cand-420-499
  source 1..80: mol_type = other DNA

SEQ ID NO: 17464 - DNA, 80 bp, synthetic construct; identical to SEQ ID NO: 17413
  misc_feature 1..80: note = Synthetic: >GCS_264b_6-cand-510-589
  source 1..80: mol_type = other DNA

SEQ ID NO: 17465 - DNA, 80 bp, synthetic construct; identical to SEQ ID NO: 17414
  misc_feature 1..80: note = Synthetic: >GCS_264b_6-cand-600-679
  source 1..80: mol_type = other DNA

SEQ ID NO: 17466 - DNA, 80 bp, synthetic construct; identical to SEQ ID NO: 17415
  misc_feature 1..80: note = Synthetic: >GCS_264b_7-cand-0-79
  source 1..80: mol_type = other DNA

SEQ ID NO: 17467 - DNA, 80 bp, synthetic construct; identical to SEQ ID NO: 17416
  misc_feature 1..80: note = Synthetic: >GCS_264b_7-cand-90-169
  source 1..80: mol_type = other DNA

SEQ ID NO: 17468 - DNA, 80 bp, synthetic construct; identical to SEQ ID NO: 17417
  misc_feature 1..80: note = Synthetic: >GCS_264b_7-cand-300-379
  source 1..80: mol_type = other DNA

SEQ ID NO: 17469 - DNA, 80 bp, synthetic construct; identical to SEQ ID NO: 17418
  misc_feature 1..80: note = Synthetic: >GCS_264b_7-cand-390-469
  source 1..80: mol_type = other DNA

SEQ ID NO: 17470 - DNA, 80 bp, synthetic construct; identical to SEQ ID NO: 17419
  misc_feature 1..80: note = Synthetic: >GCS_264b_7-cand-480-559
  source 1..80: mol_type = other DNA

SEQ ID NO: 17471 - DNA, 80 bp, synthetic construct; identical to SEQ ID NO: 17420
  misc_feature 1..80: note = Synthetic: >GCS_264b_7-cand-570-649
  source 1..80: mol_type = other DNA

SEQ ID NO: 17472 - DNA, 80 bp, synthetic construct; identical to SEQ ID NO: 17421
  misc_feature 1..80: note = Synthetic: >GCS_264b_8-cand-0-79
  source 1..80: mol_type = other DNA

SEQ ID NO: 17473 - DNA, 80 bp, synthetic construct; identical to SEQ ID NO: 17422
  misc_feature 1..80: note = Synthetic: >GCS_264b_8-cand-630-709
  source 1..80: mol_type = other DNA

SEQ ID NO: 17474 - DNA, 80 bp, synthetic construct; identical to SEQ ID NO: 17423
  misc_feature 1..80: note = Synthetic: >GCS_264b_8-cand-720-799
  source 1..80: mol_type = other DNA

SEQ ID NO: 17475 - DNA, 80 bp, synthetic construct; identical to SEQ ID NO: 17424
  misc_feature 1..80: note = Synthetic: >GCS_264b_8-cand-1110-1189
  source 1..80: mol_type = other DNA

SEQ ID NO: 17476 - DNA, 80 bp, synthetic construct; identical to SEQ ID NO: 17425
  misc_feature 1..80: note = Synthetic: >GCS_264b_9-cand-0-79
  source 1..80: mol_type = other DNA

SEQ ID NO: 17477 - DNA, 80 bp, synthetic construct; identical to SEQ ID NO: 17426
  misc_feature 1..80: note = Synthetic: >GCS_264b_9-cand-90-169
  source 1..80: mol_type = other DNA

SEQ ID NO: 17478 - DNA, 80 bp, synthetic construct; identical to SEQ ID NO: 17427
  misc_feature 1..80: note = Synthetic: >GCS_264b_9-cand-180-259
  source 1..80: mol_type = other DNA

SEQ ID NO: 17479 - DNA, 80 bp, synthetic construct; identical to SEQ ID NO: 17428
  misc_feature 1..80: note = Synthetic: >GCS_264b_9-cand-360-439
  source 1..80: mol_type = other DNA

SEQ ID NO: 17480 - DNA, 80 bp, synthetic construct; identical to SEQ ID NO: 17429
  misc_feature 1..80: note = Synthetic: >GCS_264b_9-cand-920-999
  source 1..80: mol_type = other DNA

SEQ ID NO: 17481 - DNA, 80 bp, synthetic construct; identical to SEQ ID NO: 17425
  misc_feature 1..80: note = Synthetic: >GCS_265a_10-cand-0-79
  source 1..80: mol_type = other DNA

SEQ ID NO: 17482 - DNA, 80 bp, synthetic construct; identical to SEQ ID NO: 17426
  misc_feature 1..80: note = Synthetic: >GCS_265a_10-cand-90-169
  source 1..80: mol_type = other DNA

SEQ ID NO: 17483 - DNA, 80 bp, synthetic construct; identical to SEQ ID NO: 17427
  misc_feature 1..80: note = Synthetic: >GCS_265a_10-cand-180-259
  source 1..80: mol_type = other DNA

SEQ ID NO: 17484 - DNA, 80 bp, synthetic construct; identical to SEQ ID NO: 17428
  misc_feature 1..80: note = Synthetic: >GCS_265a_10-cand-360-439
  source 1..80: mol_type = other DNA

SEQ ID NO: 17485 - DNA, 80 bp, synthetic construct
  misc_feature 1..80: note = Synthetic: >GCS_265a_10-cand-890-969
  source 1..80: mol_type = other DNA
acacaatccctattaaggatgaactttaggtcaggttgtggtttgaacgaacatgaatgttttagcaattctatgttttc

SEQ ID NO: 17486 - DNA, 80 bp, synthetic construct; identical to SEQ ID NO: 17381
  misc_feature 1..80: note = Synthetic: >GCS_265a_11-cand-0-79
  source 1..80: mol_type = other DNA

SEQ ID NO: 17487 - DNA, 80 bp, synthetic construct; identical to SEQ ID NO: 17382
  misc_feature 1..80: note = Synthetic: >GCS_265a_11-cand-180-259
  source 1..80: mol_type = other DNA

SEQ ID NO: 17488 - DNA, 80 bp, synthetic construct; identical to SEQ ID NO: 17383
  misc_feature 1..80: note = Synthetic: >GCS_265a_11-cand-260-339
  source 1..80: mol_type = other DNA

SEQ ID NO: 17489 - DNA, 80 bp, synthetic construct; identical to SEQ ID NO: 17384
  misc_feature 1..80: note = Synthetic: >GCS_265a_11-cand-580-659
  source 1..80: mol_type = other DNA

SEQ ID NO: 17490 - DNA, 80 bp, synthetic construct; identical to SEQ ID NO: 17385
  misc_feature 1..80: note = Synthetic: >GCS_265a_11-cand-660-739
  source 1..80: mol_type = other DNA

SEQ ID NO: 17491 - DNA, 80 bp, synthetic construct; identical to SEQ ID NO: 17386
  misc_feature 1..80: note = Synthetic: >GCS_265a_11-cand-740-819
  source 1..80: mol_type = other DNA

SEQ ID NO: 17492 - DNA, 80 bp, synthetic construct; identical to SEQ ID NO: 17387
  misc_feature 1..80: note = Synthetic: >GCS_265a_11-cand-820-899
  source 1..80: mol_type = other DNA

SEQ ID NO: 17493 - DNA, 80 bp, synthetic construct; identical to SEQ ID NO: 17388
  misc_feature 1..80: note = Synthetic: >GCS_265a_11-cand-900-979
  source 1..80: mol_type = other DNA

SEQ ID NO: 17494 - DNA, 80 bp, synthetic construct; identical to SEQ ID NO: 17389
  misc_feature 1..80: note = Synthetic: >GCS_265a_11-cand-980-1059
  source 1..80: mol_type = other DNA

SEQ ID NO: 17495 - DNA, 80 bp, synthetic construct; identical to SEQ ID NO: 17390
  misc_feature 1..80: note = Synthetic: >GCS_265a_11-cand-1060-1139
  source 1..80: mol_type = other DNA

SEQ ID NO: 17496 - DNA, 80 bp, synthetic construct; identical to SEQ ID NO: 17391
  misc_feature 1..80: note = Synthetic: >GCS_265a_11-cand-1140-1219
  source 1..80: mol_type = other DNA

SEQ ID NO: 17497 - DNA, 80 bp, synthetic construct; identical to SEQ ID NO: 17392
  misc_feature 1..80: note = Synthetic: >GCS_265a_11-cand-1220-1299
  source 1..80: mol_type = other DNA

SEQ ID NO: 17498 - DNA, 80 bp, synthetic construct; identical to SEQ ID NO: 17393
  misc_feature 1..80: note = Synthetic: >GCS_265a_11-cand-1310-1389
  source 1..80: mol_type = other DNA

SEQ ID NO: 17499 - DNA, 80 bp, synthetic construct; identical to SEQ ID NO: 17379
  misc_feature 1..80: note = Synthetic: >GCS_265a_2-cand-0-79
  source 1..80: mol_type = other DNA

SEQ ID NO: 17500 - DNA, 80 bp, synthetic construct; identical to SEQ ID NO: 17380
  misc_feature 1..80: note = Synthetic: >GCS_265a_2-cand-80-159
  source 1..80: mol_type = other DNA

SEQ ID NO: 17501 - DNA, 80 bp, synthetic construct; identical to SEQ ID NO: 17415
  misc_feature 1..80: note = Synthetic: >GCS_265a_4-cand-0-79
  source 1..80: mol_type = other DNA

SEQ ID NO: 17502 - DNA, 80 bp, synthetic construct; identical to SEQ ID NO: 17399
  misc_feature 1..80: note = Synthetic: >GCS_265a_5-cand-230-309
  source 1..80: mol_type = other DNA

SEQ ID NO: 17503 - DNA, 80 bp, synthetic construct; identical to SEQ ID NO: 17400
  misc_feature 1..80: note = Synthetic: >GCS_265a_5-cand-330-409
  source 1..80: mol_type = other DNA

SEQ ID NO: 17504 - DNA, 80 bp, synthetic construct; identical to SEQ ID NO: 17401
  misc_feature 1..80: note = Synthetic: >GCS_265a_6-cand-410-489
  source 1..80: mol_type = other DNA

SEQ ID NO: 17505 - DNA, 80 bp, synthetic construct; identical to SEQ ID NO: 17402
  misc_feature 1..80: note = Synthetic: >GCS_265a_6-cand-500-579
  source 1..80: mol_type = other DNA

SEQ ID NO: 17506 - DNA, 80 bp, synthetic construct; identical to SEQ ID NO: 17403
  misc_feature 1..80: note = Synthetic: >GCS_265a_7-cand-100-179
  source 1..80: mol_type = other DNA

SEQ ID NO: 17507 - DNA, 80 bp, synthetic construct; identical to SEQ ID NO: 17404
  misc_feature 1..80: note = Synthetic: >GCS_265a_7-cand-310-389
  source 1..80: mol_type = other DNA

SEQ ID NO: 17508 - DNA, 80 bp, synthetic construct; identical to SEQ ID NO: 17405
  misc_feature 1..80: note = Synthetic: >GCS_265a_7-cand-410-489
  source 1..80: mol_type = other DNA

SEQ ID NO: 17509 - DNA, 80 bp, synthetic construct; identical to SEQ ID NO: 17406
  misc_feature 1..80: note = Synthetic: >GCS_265a_7-cand-510-589
  source 1..80: mol_type = other DNA

SEQ ID NO: 17510 - DNA, 80 bp, synthetic construct; identical to SEQ ID NO: 17407
  misc_feature 1..80: note = Synthetic: >GCS_265a_7-cand-610-689
  source 1..80: mol_type = other DNA

SEQ ID NO: 17511 - DNA, 80 bp, synthetic construct; identical to SEQ ID NO: 17408
  misc_feature 1..80: note = Synthetic: >GCS_265a_8-cand-0-79
  source 1..80: mol_type = other DNA

SEQ ID NO: 17512 - DNA, 80 bp, synthetic construct; identical to SEQ ID NO: 17409
  misc_feature 1..80: note = Synthetic: >GCS_265a_8-cand-90-169
  source 1..80: mol_type = other DNA

SEQ ID NO: 17513 - DNA, 80 bp, synthetic construct; identical to SEQ ID NO: 17410
  misc_feature 1..80: note = Synthetic: >GCS_265a_8-cand-240-319
  source 1..80: mol_type = other DNA

SEQ ID NO: 17514 - DNA, 80 bp, synthetic construct; identical to SEQ ID NO: 17411
  misc_feature 1..80: note = Synthetic: >GCS_265a_8-cand-330-409
  source 1..80: mol_type = other DNA

SEQ ID NO: 17515 - DNA, 80 bp, synthetic construct; identical to SEQ ID NO: 17412
  misc_feature 1..80: note = Synthetic: >GCS_265a_8-cand-420-499
  source 1..80: mol_type = other DNA

SEQ ID NO: 17516 - DNA, 80 bp, synthetic construct; identical to SEQ ID NO: 17413
  misc_feature 1..80: note = Synthetic: >GCS_265a_8-cand-510-589
  source 1..80: mol_type = other DNA

SEQ ID NO: 17517 - DNA, 80 bp, synthetic construct; identical to SEQ ID NO: 17414
  misc_feature 1..80: note = Synthetic: >GCS_265a_8-cand-600-679
  source 1..80: mol_type = other DNA

SEQ ID NO: 17518 - DNA, 80 bp, synthetic construct; identical to SEQ ID NO: 17421
  misc_feature 1..80: note = Synthetic: >GCS_265a_9-cand-0-79
  source 1..80: mol_type = other DNA

SEQ ID NO: 17519 - DNA, 80 bp, synthetic construct; identical to SEQ ID NO: 17422
  misc_feature 1..80: note = Synthetic: >GCS_265a_9-cand-630-709
  source 1..80: mol_type = other DNA

SEQ ID NO: 17520 - DNA, 80 bp, synthetic construct; identical to SEQ ID NO: 17423
  misc_feature 1..80: note = Synthetic: >GCS_265a_9-cand-720-799
  source 1..80: mol_type = other DNA

SEQ ID NO: 17521 - DNA, 80 bp, synthetic construct; identical to SEQ ID NO: 17424
  misc_feature 1..80: note = Synthetic: >GCS_265a_9-cand-1110-1189
  source 1..80: mol_type = other DNA

SEQ ID NO: 17522 - DNA, 80 bp, synthetic construct; identical to SEQ ID NO: 17425
  misc_feature 1..80: note = Synthetic: >GCS_265b_10-cand-0-79
  source 1..80: mol_type = other DNA

SEQ ID NO: 17523 - DNA, 80 bp, synthetic construct; identical to SEQ ID NO: 17426
  misc_feature 1..80: note = Synthetic: >GCS_265b_10-cand-90-169
  source 1..80: mol_type = other DNA

SEQ ID NO: 17524 - DNA, 80 bp, synthetic construct; identical to SEQ ID NO: 17427
  misc_feature 1..80: note = Synthetic: >GCS_265b_10-cand-180-259
  source 1..80: mol_type = other DNA

SEQ ID NO: 17525 - DNA, 80 bp, synthetic construct; identical to SEQ ID NO: 17428
  misc_feature 1..80: note = Synthetic: >GCS_265b_10-cand-360-439
  source 1..80: mol_type = other DNA

SEQ ID NO: 17526 - DNA, 80 bp, synthetic construct; identical to SEQ ID NO: 17485
  misc_feature 1..80: note = Synthetic: >GCS_265b_10-cand-890-969
  source 1..80: mol_type = other DNA

SEQ ID NO: 17527 - DNA, 80 bp, synthetic construct; identical to SEQ ID NO: 17381
  misc_feature 1..80: note = Synthetic: >GCS_265b_11-cand-0-79
  source 1..80: mol_type = other DNA

SEQ ID NO: 17528 - DNA, 80 bp, synthetic construct; identical to SEQ ID NO: 17382
  misc_feature 1..80: note = Synthetic: >GCS_265b_11-cand-180-259
  source 1..80: mol_type = other DNA

SEQ ID NO: 17529 - DNA, 80 bp, synthetic construct; identical to SEQ ID NO: 17383
  misc_feature 1..80: note = Synthetic: >GCS_265b_11-cand-260-339
  source 1..80: mol_type = other DNA

SEQ ID NO: 17530 - DNA, 80 bp, synthetic construct; identical to SEQ ID NO: 17384
  misc_feature 1..80: note = Synthetic: >GCS_265b_11-cand-580-659
  source 1..80: mol_type = other DNA

SEQ ID NO: 17531 - DNA, 80 bp, synthetic construct; identical to SEQ ID NO: 17385
  misc_feature 1..80: note = Synthetic: >GCS_265b_11-cand-660-739
  source 1..80: mol_type = other DNA

SEQ ID NO: 17532 - DNA, 80 bp, synthetic construct; identical to SEQ ID NO: 17386
  misc_feature 1..80: note = Synthetic: >GCS_265b_11-cand-740-819
  source 1..80: mol_type = other DNA

SEQ ID NO: 17533 - DNA, 80 bp, synthetic construct; identical to SEQ ID NO: 17387
  misc_feature 1..80: note = Synthetic: >GCS_265b_11-cand-820-899
  source 1..80: mol_type = other DNA

SEQ ID NO: 17534 - DNA, 80 bp, synthetic construct; identical to SEQ ID NO: 17388
  misc_feature 1..80: note = Synthetic: >GCS_265b_11-cand-900-979
  source 1..80: mol_type = other DNA

SEQ ID NO: 17535 - DNA, 80 bp, synthetic construct; identical to SEQ ID NO: 17389
  misc_feature 1..80: note = Synthetic: >GCS_265b_11-cand-980-1059
  source 1..80: mol_type = other DNA

SEQ ID NO: 17536 - DNA, 80 bp, synthetic construct; identical to SEQ ID NO: 17390
  misc_feature 1..80: note = Synthetic: >GCS_265b_11-cand-1060-1139
  source 1..80: mol_type = other DNA

SEQ ID NO: 17537 - DNA, 80 bp, synthetic construct; identical to SEQ ID NO: 17391
  misc_feature 1..80: note = Synthetic: >GCS_265b_11-cand-1140-1219
  source 1..80: mol_type = other DNA

SEQ ID NO: 17538 - DNA, 80 bp, synthetic construct; identical to SEQ ID NO: 17392
  misc_feature 1..80: note = Synthetic: >GCS_265b_11-cand-1220-1299
  source 1..80: mol_type = other DNA

SEQ ID NO: 17539 - DNA, 80 bp, synthetic construct; identical to SEQ ID NO: 17393
  misc_feature 1..80: note = Synthetic: >GCS_265b_11-cand-1310-1389
  source 1..80: mol_type = other DNA

SEQ ID NO: 17540 - DNA, 80 bp, synthetic construct; identical to SEQ ID NO: 17379
  misc_feature 1..80: note = Synthetic: >GCS_265b_2-cand-0-79
  source 1..80: mol_type = other DNA

SEQ ID NO: 17541 - DNA, 80 bp, synthetic construct; identical to SEQ ID NO: 17380
  misc_feature 1..80: note = Synthetic: >GCS_265b_2-cand-80-159
  source 1..80: mol_type = other DNA

SEQ ID NO: 17542 - DNA, 80 bp, synthetic construct; identical to SEQ ID NO: 17415
  misc_feature 1..80: note = Synthetic: >GCS_265b_4-cand-0-79
  source 1..80: mol_type = other DNA

SEQ ID NO: 17543 - DNA, 80 bp, synthetic construct; identical to SEQ ID NO: 17399
  misc_feature 1..80: note = Synthetic: >GCS_265b_5-cand-230-309
  source 1..80: mol_type = other DNA

SEQ ID NO: 17544 - DNA, 80 bp, synthetic construct; identical to SEQ ID NO: 17400
  misc_feature 1..80: note = Synthetic: >GCS_265b_5-cand-330-409
  source 1..80: mol_type = other DNA

SEQ ID NO: 17545 - DNA, 80 bp, synthetic construct; identical to SEQ ID NO: 17401
  misc_feature 1..80: note = Synthetic: >GCS_265b_6-cand-410-489
  source 1..80: mol_type = other DNA

SEQ ID NO: 17546 - DNA, 80 bp, synthetic construct; identical to SEQ ID NO: 17402
  misc_feature 1..80: note = Synthetic: >GCS_265b_6-cand-500-579
  source 1..80: mol_type = other DNA

SEQ ID NO: 17547 - DNA, 80 bp, synthetic construct; identical to SEQ ID NO: 17403
  misc_feature 1..80: note = Synthetic: >GCS_265b_7-cand-100-179
  source 1..80: mol_type = other DNA

SEQ ID NO: 17548 - DNA, 80 bp, synthetic construct; identical to SEQ ID NO: 17404
  misc_feature 1..80: note = Synthetic: >GCS_265b_7-cand-310-389
  source 1..80: mol_type = other DNA

SEQ ID NO: 17549 - DNA, 80 bp, synthetic construct; identical to SEQ ID NO: 17405
  misc_feature 1..80: note = Synthetic: >GCS_265b_7-cand-410-489
  source 1..80: mol_type = other DNA

SEQ ID NO: 17550 - DNA, 80 bp, synthetic construct; identical to SEQ ID NO: 17406
  misc_feature 1..80: note = Synthetic: >GCS_265b_7-cand-510-589
  source 1..80: mol_type = other DNA

SEQ ID NO: 17551 - DNA, 80 bp, synthetic construct; identical to SEQ ID NO: 17407
  misc_feature 1..80: note = Synthetic: >GCS_265b_7-cand-610-689
  source 1..80: mol_type = other DNA

SEQ ID NO: 17552 - DNA, 80 bp, synthetic construct; identical to SEQ ID NO: 17408
  misc_feature 1..80: note = Synthetic: >GCS_265b_8-cand-0-79
  source 1..80: mol_type = other DNA

SEQ ID NO: 17553 - DNA, 80 bp, synthetic construct; identical to SEQ ID NO: 17409
  misc_feature 1..80: note = Synthetic: >GCS_265b_8-cand-90-169
  source 1..80: mol_type = other DNA

SEQ ID NO: 17554 - DNA, 80 bp, synthetic construct; identical to SEQ ID NO: 17410
  misc_feature 1..80: note = Synthetic: >GCS_265b_8-cand-240-319
  source 1..80: mol_type = other DNA

SEQ ID NO: 17555 - DNA, 80 bp, synthetic construct; identical to SEQ ID NO: 17411
  misc_feature 1..80: note = Synthetic: >GCS_265b_8-cand-330-409
  source 1..80: mol_type = other DNA

SEQ ID NO: 17556 - DNA, 80 bp, synthetic construct; identical to SEQ ID NO: 17412
  misc_feature 1..80: note = Synthetic: >GCS_265b_8-cand-420-499
  source 1..80: mol_type = other DNA

SEQ ID NO: 17557 - DNA, 80 bp, synthetic construct; identical to SEQ ID NO: 17413
  misc_feature 1..80: note = Synthetic: >GCS_265b_8-cand-510-589
  source 1..80: mol_type = other DNA

SEQ ID NO: 17558 - DNA, 80 bp, synthetic construct; identical to SEQ ID NO: 17414
  misc_feature 1..80: note = Synthetic: >GCS_265b_8-cand-600-679
  source 1..80: mol_type = other DNA

SEQ ID NO: 17559 - DNA, 80 bp, synthetic construct; identical to SEQ ID NO: 17421
  misc_feature 1..80: note = Synthetic: >GCS_265b_9-cand-0-79
  source 1..80: mol_type = other DNA

SEQ ID NO: 17560 - DNA, 80 bp, synthetic construct; identical to SEQ ID NO: 17422
  misc_feature 1..80: note = Synthetic: >GCS_265b_9-cand-630-709
  source 1..80: mol_type = other DNA

SEQ ID NO: 17561 - DNA, 80 bp, synthetic construct; identical to SEQ ID NO: 17423
  misc_feature 1..80: note = Synthetic: >GCS_265b_9-cand-720-799
  source 1..80: mol_type = other DNA

SEQ ID NO: 17562 - DNA, 80 bp, synthetic construct; identical to SEQ ID NO: 17424
  misc_feature 1..80: note = Synthetic: >GCS_265b_9-cand-1110-1189
  source 1..80: mol_type = other DNA

SEQ ID NO: 17563 - DNA, 80 bp, synthetic construct; identical to SEQ ID NO: 16768
  misc_feature 1..80: note = Synthetic: >GQ153539_1-cand-0-79
  source 1..80: mol_type = other DNA

SEQ ID NO: 17564 - DNA, 80 bp, synthetic construct; identical to SEQ ID NO: 16769
  misc_feature 1..80: note = Synthetic: >GQ153539_1-cand-280-359
  source 1..80: mol_type = other DNA

SEQ ID NO: 17565 - DNA, 80 bp, synthetic construct; identical to SEQ ID NO: 16768
  misc_feature 1..80: note = Synthetic: >GQ153540_1-cand-0-79
  source 1..80: mol_type = other DNA

SEQ ID NO: 17566 - DNA, 80 bp, synthetic construct; identical to SEQ ID NO: 16769
  misc_feature 1..80: note = Synthetic: >GQ153540_1-cand-280-359
  source 1..80: mol_type = other DNA

SEQ ID NO: 17567 - DNA, 80 bp, synthetic construct; identical to SEQ ID NO: 16768
  misc_feature 1..80: note = Synthetic: >GQ153541_1-cand-0-79
  source 1..80: mol_type = other DNA

SEQ ID NO: 17568 - DNA, 80 bp, synthetic construct; identical to SEQ ID NO: 16769
  misc_feature 1..80: note = Synthetic: >GQ153541_1-cand-280-359
  source 1..80: mol_type = other DNA

SEQ ID NO: 17569 - DNA, 80 bp, synthetic construct
  misc_feature 1..80: note = Synthetic: >GQ153542_1-cand-110-189
  source 1..80: mol_type = other DNA
tccttagtgtttatcaaacctatactgctgttaatttacccagaggtttgcctgaaggtttttcagttttaagaccaatt

SEQ ID NO: 17570 - DNA, 80 bp, synthetic construct; identical to SEQ ID NO: 17569
  misc_feature 1..80: note = Synthetic: >GQ153543_1-cand-110-189
  source 1..80: mol_type = other DNA

SEQ ID NO: 17571 - DNA, 80 bp, synthetic construct; identical to SEQ ID NO: 16768
  misc_feature 1..80: note = Synthetic: >GQ153544_1-cand-0-79
  source 1..80: mol_type = other DNA

SEQ ID NO: 17572 - DNA, 80 bp, synthetic construct; identical to SEQ ID NO: 16769
  misc_feature 1..80: note = Synthetic: >GQ153544_1-cand-280-359
  source 1..80: mol_type = other DNA

SEQ ID NO: 17573 - DNA, 80 bp, synthetic construct; identical to SEQ ID NO: 16768
  misc_feature 1..80: note = Synthetic: >GQ153545_1-cand-0-79
  source 1..80: mol_type = other DNA

SEQ ID NO: 17574 - DNA, 80 bp, synthetic construct; identical to SEQ ID NO: 16769
  misc_feature 1..80: note = Synthetic: >GQ153545_1-cand-280-359
  source 1..80: mol_type = other DNA

SEQ ID NO: 17575 - DNA, 80 bp, synthetic construct; identical to SEQ ID NO: 16768
  misc_feature 1..80: note = Synthetic: >GQ153546_1-cand-0-79
  source 1..80: mol_type = other DNA

SEQ ID NO: 17576 - DNA, 80 bp, synthetic construct; identical to SEQ ID NO: 16769
  misc_feature 1..80: note = Synthetic: >GQ153546_1-cand-280-359
  source 1..80: mol_type = other DNA

SEQ ID NO: 17577 - DNA, 80 bp, synthetic construct; identical to SEQ ID NO: 16768
  misc_feature 1..80: note = Synthetic: >GQ153547_1-cand-0-79
  source 1..80: mol_type = other DNA

SEQ ID NO: 17578 - DNA, 80 bp, synthetic construct; identical to SEQ ID NO: 16769
  misc_feature 1..80: note = Synthetic: >GQ153547_1-cand-280-359
  source 1..80: mol_type = other DNA

SEQ ID NO: 17579 - DNA, 80 bp, synthetic construct; identical to SEQ ID NO: 16768
  misc_feature 1..80: note = Synthetic: >GQ153548_1-cand-0-79
  source 1..80: mol_type = other DNA

SEQ ID NO: 17580 - DNA, 80 bp, synthetic construct; identical to SEQ ID NO: 16769
  misc_feature 1..80: note = Synthetic: >GQ153548_1-cand-280-359
  source 1..80: mol_type = other DNA

SEQ ID NO: 17581 - DNA, 80 bp, synthetic construct; identical to SEQ ID NO: 16887
  misc_feature 1..80: note = Synthetic: >GQ427173_1-cand-310-389
  source 1..80: mol_type = other DNA

SEQ ID NO: 17582 - DNA, 80 bp, synthetic construct
  misc_feature 1..80: note = Synthetic: >GQ427174_1-cand-190-269
  source 1..80: mol_type = other DNA
attatgatgctattggcataatgttttggtggggcattgaaattaatgcgggtgaagtaaccgtggatcctacttttaat

SEQ ID NO: 17583 - DNA, 80 bp, synthetic construct
  misc_feature 1..80: note = Synthetic: >GQ427175_1-cand-660-739
  source 1..80: mol_type = other DNA
gacaatactggtcaagaggtatgtgacttttatgtagctcttaaaggagatcatgttatttacaaccaaagttgtgtaga

SEQ ID NO: 17584 - DNA, 80 bp, synthetic construct
  misc_feature 1..80: note = Synthetic: >GQ427176_1-cand-110-189
  source 1..80: mol_type = other DNA
tcaaactgataccacctgtaaaaatgggctttatgcagggtcgccaggtaattttactatacaaggtggttttcttcaaa

SEQ ID NO: 17585 - DNA, 80 bp, synthetic construct
  misc_feature 1..80: note = Synthetic: >GQ427176_1-cand-210-289
  source 1..80: mol_type = other DNA
atgttttggtggggcattggtactaatgcagataaaaaatccaatgatcccatttttaatttaacatggggcaacttttt

SEQ ID NO: 17586 - DNA, 80 bp, synthetic construct
  misc_feature 1..80: note = Synthetic: >GQ427176_1-cand-590-669
  source 1..80: mol_type = other DNA
tgacatagatacttttgtacctgtgacacctaatattacacatttaccttacccagatttaaaagataatactagtcaag

SEQ ID NO: 17587 - DNA, 80 bp, synthetic construct
  misc_feature 1..80: note = Synthetic: >GQ477367_1-cand-0-79
  source 1..80: mol_type = other DNA
gtgttaggtgattactttcctactgtgacaccttggtttaattgcattcgcaataataataatagtctttatgtcacaat

SEQ ID NO: 17588 - DNA, 80 bp, synthetic construct
  misc_feature 1..80: note = Synthetic: >GQ477367_1-cand-220-299
  source 1..80: mol_type = other DNA
gtgctattatatgtatttgcaaaggtacaccacctaagactactaccgtcaattcggcatctcaactgaattgtaattgg

SEQ ID NO: 17589 - DNA, 80 bp, synthetic construct
  misc_feature 1..80: note = Synthetic: >GQ477367_1-cand-320-399
  source 1..80: mol_type = other DNA
gcacacgggaacccaacatacaaaattccctatttgtccttctaatattggatccaattgtggtaatatgttgtatggtt

SEQ ID NO: 17590 - DNA, 80 bp, synthetic construct
  misc_feature 1..80: note = Synthetic: >GQ477367_1-cand-420-499
  source 1..80: mol_type = other DNA
gttgttgcttatttacatggtgctgtttatcgtattaattttgaaaaccaatggtctggtactgtcacacttggtgacat

SEQ ID NO: 17591 - DNA, 80 bp, synthetic construct
  misc_feature 1..80: note = Synthetic: >GQ477367_1-cand-520-599
  source 1..80: mol_type = other DNA
ccgctggagcggtagtagacctgtggtggtttaatcctgtttatgatatcacttattatagagtgaatagtaaaaacagc

SEQ ID NO: 17592 - DNA, 80 bp, synthetic construct
  misc_feature 1..80: note = Synthetic: >GQ477367_1-cand-620-699
  source 1..80: mol_type = other DNA
cactgatcaatgtgctagttatgtggataatatttttaccacacagcctggaggttttataccatcagattttagtttta

SEQ ID NO: 17593 - DNA, 80 bp, synthetic construct
  misc_feature 1..80: note = Synthetic: >GQ504722_2-cand-0-79
  source 1..80: mol_type = other DNA
aggttttgatacaaactcatttgttaattttacagcaggtgagtttaatatctctcttgtattacctaagaatggacaac

SEQ ID NO: 17594 - DNA, 80 bp, synthetic construct
  misc_feature 1..80: note = Synthetic: >GQ504722_3-cand-0-79
  source 1..80: mol_type = other DNA
aagtttttatgtttttgtgacacactgtggtggaaccggtcataattgcatagttaatacaaaacagcttggtgtgcttg

SEQ ID NO: 17595 - DNA, 80 bp, synthetic construct; identical to SEQ ID NO: 17593
  misc_feature 1..80: note = Synthetic: >GQ504723_2-cand-0-79
  source 1..80: mol_type = other DNA

SEQ ID NO: 17596 - DNA, 80 bp, synthetic construct
  misc_feature 1..80: note = Synthetic: >GQ504723_3-cand-0-79
  source 1..80: mol_type = other DNA
aaaactactattagttacacaagccaagagtgtactataggtgtgattcgaggtggtgttactattaatcagagtgcaat

SEQ ID NO: 17597 - DNA, 80 bp, synthetic construct
  misc_feature 1..80: note = Synthetic: >GQ504723_3-cand-160-239
  source 1..80: mol_type = other DNA
tttttgtgacacactgtggtggaactggtcataattgcatagttaatacaaaaaagcttggtgtgcttgtctttggtgtc

SEQ ID NO: 17598 - DNA, 80 bp, synthetic construct
  misc_feature 1..80: note = Synthetic: >GU190215_1-cand-0-79
  source 1..80: mol_type = other DNA
ctatcacttgtacaaacaccaaatttagttttgtttgtcaggacgagacaagacacgtatttcaattacgtgcccggtct

SEQ ID NO: 17599 - DNA, 80 bp, synthetic construct
  misc_feature 1..80: note = Synthetic: >GU190215_1-cand-110-189
  source 1..80: mol_type = other DNA
catcatagtgacgatttcaccccggtgatccttattattgtcacattgctctttgtaatctactgttgcatgaagagaca

SEQ ID NO: 17600 - DNA, 80 bp, synthetic construct
  misc_feature 1..80: note = Synthetic: >GU190215_2-cand-0-79
  source 1..80: mol_type = other DNA
agaataaaagctgctatgcccattgttatagctagaaatagtgtaataggtggtgttagattttgtctagatgctttgac

SEQ ID NO: 17601 - DNA, 80 bp, synthetic construct
  misc_feature 1..80: note = Synthetic: >GU190215_3-cand-10-89
  source 1..80: mol_type = other DNA
gtaagattttacttttactctagcaaaacacctattgctagggtaatctcaaaccttaattctcttggagagcccctgat

SEQ ID NO: 17602 - DNA, 80 bp, synthetic construct
  misc_feature 1..80: note = Synthetic: >GU190215_3-cand-110-189
  source 1..80: mol_type = other DNA
tcacacatggactcaatttagaagaatcagcgcgctacatgcgttctgttaaggttcctgttgtagtttctgtgtcttca

SEQ ID NO: 17603 - DNA, 80 bp, synthetic construct
  misc_feature 1..80: note = Synthetic: >GU190215_3-cand-320-399
  source 1..80: mol_type = other DNA
ttggtgttgaattcctcaagagaggtgacaaaattgtctaccatacagtaggaaatgttatagaatttcacatggaaggt

SEQ ID NO: 17604 - DNA, 80 bp, synthetic construct
  misc_feature 1..80: note = Synthetic: >GU190215_4-cand-0-79
  source 1..80: mol_type = other DNA
tatgagaacttcaatgcatatgaagtagttttatcaccactactgtcagcaggtatctttggtgtaagtcctattcaatc

SEQ ID NO: 17605 - DNA, 80 bp, synthetic construct
  misc_feature 1..80: note = Synthetic: >GU190215_4-cand-100-179
  source 1..80: mol_type = other DNA
tggtgcgtaacacagtctacattgttgtaaacgacagtgtggtatttgatcagcttttagccaaaacccctggaaagact

SEQ ID NO: 17606 - DNA, 80 bp, synthetic construct
  misc_feature 1..80: note = Synthetic: >GU190215_4-cand-300-379
  source 1..80: mol_type = other DNA
gaagagcctgttaaaacccgcattgaggagttgaacacaactgttgatgaggctaaatttctaaccactaagttgctatt

SEQ ID NO: 17607 - DNA, 80 bp, synthetic construct
  misc_feature 1..80: note = Synthetic: >GU190215_4-cand-400-479
  source 1..80: mol_type = other DNA
atcttagtgaagattcaaaggtgttaattggcaatgatggcgcgtcctttaaaaagggtgctccttacattgttggtgac

SEQ ID NO: 17608 - DNA, 80 bp, synthetic construct
  misc_feature 1..80: note = Synthetic: >GU190215_5-cand-0-79
  source 1..80: mol_type = other DNA
ggctaattgcacttaccacagagcacatgcatttaatattagcactaatatgaatccaggtaagtttaaacattttaggg

SEQ ID NO: 17609 - DNA, 80 bp, synthetic construct
  misc_feature 1..80: note = Synthetic: >GU190215_5-cand-90-169
  source 1..80: mol_type = other DNA
taagaatgtagacggcttcctatatgtctatcataactatgaacccattgatcttaacagtggttttccttctggctttt

SEQ ID NO: 17610 - DNA, 80 bp, synthetic construct
  misc_feature 1..80: note = Synthetic: >GU190215_5-cand-290-369
  source 1..80: mol_type = other DNA
tgggccatctaaaacctctcaccatgcttgttgactttgacgagaatggcaccattattgatgctatagattgctctcaa

SEQ ID NO: 17611 - DNA, 80 bp, synthetic construct
  misc_feature 1..80: note = Synthetic: >GU190215_5-cand-380-459
  source 1..80: mol_type = other DNA
cagagcttaagtgtaccactaagagttttacagttgaaaaaggaatttatcaaacctctaacttccgtgttacaccaacc

SEQ ID NO: 17612 - DNA, 80 bp, synthetic construct
  misc_feature 1..80: note = Synthetic: >GU190215_5-cand-470-549
  source 1..80: mol_type = other DNA
ttaggtttcctaacattacacagctttgtccttttaacgaagttttcaatataacctctttcccatccgtttacgcgtgg

SEQ ID NO: 17613 - DNA, 80 bp, synthetic construct
  misc_feature 1..80: note = Synthetic: >GU190215_5-cand-560-639
  source 1..80: mol_type = other DNA
gcattactaattgtgttgcggactactcagtgctttacaattcttctgcctccttctcaacatttcagtgttatggcgtt

SEQ ID NO: 17614 - DNA, 80 bp, synthetic construct
  misc_feature 1..80: note = Synthetic: >GU190215_5-cand-650-729
  source 1..80: mol_type = other DNA
agctcaacgatttatgctttagcagtgtttacgcagactactttgttgtgaagggtgatgatgtacgccaaattgcacct

SEQ ID NO: 17615 - DNA, 80 bp, synthetic construct
  misc_feature 1..80: note = Synthetic: >GU190215_5-cand-740-819
  source 1..80: mol_type = other DNA
gtgtgattgctgattacaattacaaattgcctgatgattttacaggttgtgtaatagcctggaatacaaattctttggac

SEQ ID NO: 17616 - DNA, 80 bp, synthetic construct
  misc_feature 1..80: note = Synthetic: >GU190215_5-cand-830-909
  source 1..80: mol_type = other DNA
aattcttttacaggagattcagacatggaaagattaaaccttatgggcgtgacctttccaatgttctttttaacccttca

SEQ ID NO: 17617 - DNA, 80 bp, synthetic construct
  misc_feature 1..80: note = Synthetic: >GU190215_5-cand-920-999
  source 1..80: mol_type = other DNA
gttcagctgaaggtcttaattgttacaaaccacttgcctcctatggatttacacagtcctctggaattggctttcaacca

SEQ ID NO: 17618 - DNA, 80 bp, synthetic construct
  misc_feature 1..80: note = Synthetic: >GU190215_5-cand-1010-1089
  source 1..80: mol_type = other DNA
ttgtgctttcttttgagttgttaaacgcacctgctacagtttgtgggcctaaacagtctactgagctagttaagaacaag

SEQ ID NO: 17619 - DNA, 80 bp, synthetic construct
  misc_feature 1..80: note = Synthetic: >GU190215_6-cand-0-79
  source 1..80: mol_type = other DNA
gaggagattgctatcttacttgcttctctttcagcgtctactagtgcttttgtagagacagttaaaaatcttgattttaa

SEQ ID NO: 17620 - DNA, 80 bp, synthetic construct
  misc_feature 1..80: note = Synthetic: >GU190215_6-cand-190-269
  source 1..80: mol_type = other DNA
attgcttttcatcgcaggctgcaggtgtagttcgctcaatcttctctcgcacacttgctacagctaatcattcaattgta

SEQ ID NO: 17621 - DNA, 80 bp, synthetic construct
  misc_feature 1..80: note = Synthetic: >GU190215_6-cand-280-359
  source 1..80: mol_type = other DNA
gagctgctatgattattttctctgatatatcagatcaagccaatcgtgtgctggatgccatggtcaacacatctgactta

SEQ ID NO: 17622 - DNA, 80 bp, synthetic construct
  misc_feature 1..80: note = Synthetic: >GU190215_6-cand-370-449
  source 1..80: mol_type = other DNA
gtgttgttgtcatggcttatctcacaggtggattggtgcaacaggttagtacctggttgagccaattacttaatacttct

SEQ ID NO: 17623 - DNA, 80 bp, synthetic construct
  misc_feature 1..80: note = Synthetic: >GU190215_6-cand-460-539
  source 1..80: mol_type = other DNA
ttagcgcagttttgcgctggcttgagcaaaagctccaaggtggcattgattttcttcgtcaagcttggggcattcttaaa

SEQ ID NO: 17624 - DNA, 80 bp, synthetic construct
  misc_feature 1..80: note = Synthetic: >GU190215_6-cand-550-629
  source 1..80: mol_type = other DNA
ctggcgcttatgtggttataagaggtaaaattcaagttgttaacactagtctcatagagtgcgttacatcatttgttgac

SEQ ID NO: 17625 - DNA, 80 bp, synthetic construct
  misc_feature 1..80: note = Synthetic: >GU190215_6-cand-640-719
  source 1..80: mol_type = other DNA
aggtttttgagctctgtactgattacattactgttgctggtgctagagtgcgtgctataaattttggtgaggttttgatt

SEQ ID NO: 17626 - DNA, 80 bp, synthetic construct
  misc_feature 1..80: note = Synthetic: >GU190215_6-cand-730-809
  source 1..80: mol_type = other DNA
gaggcctctaccgtcagtgtgtacgtgccagagatcagcttcagttgttgatgcctttaaaatcgccaaaggacgttgtt

SEQ ID NO: 17627 - DNA, 80 bp, synthetic construct
  misc_feature 1..80: note = Synthetic: >GU190215_6-cand-820-899
  source 1..80: mol_type = other DNA
gtgatgcttatgacacacttttaacctctgaggaggtaacagttaaaaatggaactcttgaagcacttgatcttgaactc

SEQ ID NO: 17628 - DNA, 80 bp, synthetic construct
  misc_feature 1..80: note = Synthetic: >GU190215_6-cand-910-989
  source 1..80: mol_type = other DNA
ttactggtgttgcggagggagtccctgtttgtgttaatggtctaatgctcttagaattgaaggaaaaggagcaatactgt

SEQ ID NO: 17629 - DNA, 80 bp, synthetic construct
  misc_feature 1..80: note = Synthetic: >GU190215_6-cand-1000-1079
  source 1..80: mol_type = other DNA
cttctctacttgcaactaataacgtctttacattaaaaggaggtgcccctacaaagggagtcacatttggtgaagacaca

SEQ ID NO: 17630 - DNA, 80 bp, synthetic construct
  misc_feature 1..80: note = Synthetic: >GU190215_6-cand-1070-1149
  source 1..80: mol_type = other DNA
tgaagacacagttgtggaaatccagggttataaaagtgttaaaatcacttttgagttggatgaacgtgttgataaagttc

SEQ ID NO: 17631 - DNA, 80 bp, synthetic construct
  misc_feature 1..80: note = Synthetic: >GU393332_3-cand-190-269
  source 1..80: mol_type = other DNA
gttttcttaaatggcaaccttctttatacttctaattatacagaagatgttaaagcagcaggtgtctatgcaaaacaagt

SEQ ID NO: 17632 - DNA, 80 bp, synthetic construct
  misc_feature 1..80: note = Synthetic: >GU393332_3-cand-510-589
  source 1..80: mol_type = other DNA
ttttaataatgttactggtgtagagcctaatggaaaacatatcgctaggtttaacattagtactattcctgaaggctatg

SEQ ID NO: 17633 - DNA, 80 bp, synthetic construct
  misc_feature 1..80: note = Synthetic: >GU393332_3-cand-670-749
  source 1..80: mol_type = other DNA
ggtagtaggtgcaattttaggccagagtctattaatagaggccttagttttaattcacttactgtatctattggttatgg

SEQ ID NO: 17634 - DNA, 80 bp, synthetic construct
  misc_feature 1..80: note = Synthetic: >GU393332_3-cand-920-999
  source 1..80: mol_type = other DNA
gaattagaactgccacatcccctcctgtttatactaataataatgttattaatattagtttgggtttgtgtgttgattat

SEQ ID NO: 17635 - DNA, 80 bp, synthetic construct
  misc_feature 1..80: note = Synthetic: >GU553361_2-cand-310-389
  source 1..80: mol_type = other DNA
acaataatactggtggctcaaattacacgcatctgcagttaaacgagtgcaacagtgattattgtgccggttatgctaag

SEQ ID NO: 17636 - DNA, 80 bp, synthetic construct
  misc_feature 1..80: note = Synthetic: >GU553361_2-cand-760-839
  source 1..80: mol_type = other DNA
tctctcatattccctttggcaaaactacgtattcatatttttgttttgccaacttctctcactctattgtgaatagacag

SEQ ID NO: 17637 - DNA, 80 bp, synthetic construct; identical to SEQ ID NO: 17635
  misc_feature 1..80: note = Synthetic: >GU553362_2-cand-310-389
  source 1..80: mol_type = other DNA

SEQ ID NO: 17638 - DNA, 80 bp, synthetic construct; identical to SEQ ID NO: 17636
  misc_feature 1..80: note = Synthetic: >GU553362_2-cand-760-839
  source 1..80: mol_type = other DNA

SEQ ID NO: 17639 - DNA, 80 bp, synthetic construct
  misc_feature 1..80: note = Synthetic: >HM211101_1-cand-0-79
  source 1..80: mol_type = other DNA
ggtgtcgaacatgtgtttacactgctcgacccctttggccggtttatatgcagtcatcgtactgtgaatggctctttacc

SEQ ID NO: 17640 - DNA, 80 bp, synthetic construct
  misc_feature 1..80: note = Synthetic: >HM245925_1-cand-40-119
  source 1..80: mol_type = other DNA
cacttgccatgggttcacgcttggaatcgatggaacttgagtctatgatatccatttccgaaaatgctttgaagttggca

SEQ ID NO: 17641 - DNA, 80 bp, synthetic construct
  misc_feature 1..80: note = Synthetic: >HM245925_10-cand-0-79
  source 1..80: mol_type = other DNA
atgtggagcttgcacttcataaattagaacctttactgtgtgctagtgggtcagtcactttggatgaatttagtggttgt

SEQ ID NO: 17642 - DNA, 80 bp, synthetic construct
  misc_feature 1..80: note = Synthetic: >HM245925_10-cand-50-129
  source 1..80: mol_type = other DNA
tcagtcactttggatgaatttagtggttgtgattgttgttataatcgtagtactataagtggtcccatagttgcagtacc

SEQ ID NO: 17643 - DNA, 80 bp, synthetic construct
  misc_feature 1..80: note = Synthetic: >HM245925_10-cand-160-239
  source 1..80: mol_type = other DNA
tagacatggagtgagagttacaacgcgagtgcataaaattcagggttctgttattctaacatcgattaatggttctgtca

SEQ ID NO: 17644 - DNA, 80 bp, synthetic construct
  misc_feature 1..80: note = Synthetic: >HM245925_10-cand-270-349
  source 1..80: mol_type = other DNA
gttttacaggtagtaaggatagaggacattacacttactactctggcgttatgtatgacgctgacaaaacataccctttc

SEQ ID NO: 17645 - DNA, 80 bp, synthetic construct
  misc_feature 1..80: note = Synthetic: >HM245925_10-cand-360-439
  source 1..80: mol_type = other DNA
accttagtgtaacatcagttctaatttcaaatggttacactgtgccagtggtacaatcaccgagaattactagagacctg

SEQ ID NO: 17646 - DNA, 80 bp, synthetic construct
  misc_feature 1..80: note = Synthetic: >HM245925_11-cand-0-79
  source 1..80: mol_type = other DNA
aagaattatagtagccgcctgccttcaaattctgacgttgttttaggcgattattttccaactgttaaaccgtggtacaa

SEQ ID NO: 17647 - DNA, 80 bp, synthetic construct
  misc_feature 1..80: note = Synthetic: >HM245925_11-cand-90-169
  source 1..80: mol_type = other DNA
agatattggggtgcacacaatgcattacttttagaaaatcttaaagcactatattgggacacagttcaaggtgtgacagg

SEQ ID NO: 17648 - DNA, 80 bp, synthetic construct
  misc_feature 1..80: note = Synthetic: >HM245925_11-cand-190-269
  source 1..80: mol_type = other DNA
ttgttagtatacatggttcaccgtatagtgctacagtgtaccataaaaatggtgagatggcacgctatgatagcggtaga

SEQ ID NO: 17649 - DNA, 80 bp, synthetic construct
  misc_feature 1..80: note = Synthetic: >HM245925_11-cand-280-359
  source 1..80: mol_type = other DNA
gtaaaggtgccattaatacaactgttgctacaggctctggtaattgttggggctatgattgtaaaattaatagtacattt

SEQ ID NO: 17650 - DNA, 80 bp, synthetic construct
  misc_feature 1..80: note = Synthetic: >HM245925_11-cand-380-459
  source 1..80: mol_type = other DNA
ttgtggtgacttattgtatggtttgcaatggtccaattcagaattgatggcgtacttgtctggtgacatttaccgtatta

SEQ ID NO: 17651 - DNA, 80 bp, synthetic construct
  misc_feature 1..80: note = Synthetic: >HM245925_11-cand-620-699
  source 1..80: mol_type = other DNA
ttgtgctgactatgtaaacaacatatttagtacagaatctggtggtattataccagaaggtttcagttttaacaactggt

SEQ ID NO: 17652 - DNA, 80 bp, synthetic construct
  misc_feature 1..80: note = Synthetic: >HM245925_12-cand-40-119
  source 1..80: mol_type = other DNA
cctggcagtctatttgtaagtttttaagtgctggtggttttacttatgttgctataagggatgccatcaacgcaatttgc

SEQ ID NO: 17653 - DNA, 80 bp, synthetic construct
  misc_feature 1..80: note = Synthetic: >HM245925_12-cand-460-539
  source 1..80: mol_type = other DNA
ttgttcaacctggaccaggctatgccgttgttataggcggtatggccttttattgcactggtgattactattttatgatg

SEQ ID NO: 17654 - DNA, 80 bp, synthetic construct
  misc_feature 1..80: note = Synthetic: >HM245925_12-cand-540-619
  source 1..80: mol_type = other DNA
tcatcacctaccagtgttatcacaacatctgtttttaaggcttctacattcaatgcattttgtttgcgctatgatgtaga

SEQ ID NO: 17655 - DNA, 80 bp, synthetic construct
  misc_feature 1..80: note = Synthetic: >HM245925_12-cand-620-699
  source 1..80: mol_type = other DNA
ggacccttacaaaactaagcttgttgcaagatttggtaatgtgtactctgctaatggttgcattgatgatgcagttgaat

SEQ ID NO: 17656 - DNA, 80 bp, synthetic construct
  misc_feature 1..80: note = Synthetic: >HM245925_12-cand-700-779
  source 1..80: mol_type = other DNA
ctcttaatgtggctctgaaggaattttacagtaatggtgtgtgctttaaagcatatgcagacaaagacatcatcgttata

SEQ ID NO: 17657 - DNA, 80 bp, synthetic construct
  misc_feature 1..80: note = Synthetic: >HM245925_12-cand-780-859
  source 1..80: mol_type = other DNA
gaaccattttgtcgtaaatataaaatgccaaagtgtcttagagatcacactggtctttgggacatcattcggtctaatgc

SEQ ID NO: 17658 - DNA, 80 bp, synthetic construct
  misc_feature 1..80: note = Synthetic: >HM245925_12-cand-940-1019
  source 1..80: mol_type = other DNA
tgttgtgtcctaaagttttgtttaggctagacaatggtattatatggtatagacatatcaggagtgttaaaaactgtaaa

SEQ ID NO: 17659 - DNA, 80 bp, synthetic construct
  misc_feature 1..80: note = Synthetic: >HM245925_12-cand-1020-1099
  source 1..80: mol_type = other DNA
ataacacatgtaacgtgtacttttacaggtggaatccttaagttgttattggatggctatgacgctcttgctggtatgat

SEQ ID NO: 17660 - DNA, 80 bp, synthetic construct
  misc_feature 1..80: note = Synthetic: >HM245925_12-cand-1100-1179
  source 1..80: mol_type = other DNA
aactcgtggttaccaacaactttgcaaggcgaagccattcaagcttgatattgctggcgtgacgcttaatggttttacaa

SEQ ID NO: 17661 - DNA, 80 bp, synthetic construct
  misc_feature 1..80: note = Synthetic: >HM245925_12-cand-1180-1259
  source 1..80: mol_type = other DNA
caccaattggtcgtgacttcctagattttggtgaggatgtcgtcgaaatcttttgtggtggtaaaacacgctgtttttca

SEQ ID NO: 17662 - DNA, 80 bp, synthetic construct
  misc_feature 1..80: note = Synthetic: >HM245925_12-cand-1240-1319
  source 1..80: mol_type = other DNA
gtaaaacacgctgtttttcaggtgctagcattcctgttagtgttgaaaagattgttgaagatgatgtctggtctacaact

SEQ ID NO: 17663 - DNA, 80 bp, synthetic construct
  misc_feature 1..80: note = Synthetic: >HM245925_12-cand-1320-1399
  source 1..80: mol_type = other DNA
attttggaagagactgagtatcagccaccaaagaatggaggtgttgtggtagttatagatggttacacgttttacacttg

SEQ ID NO: 17664 - DNA, 80 bp, synthetic construct
  misc_feature 1..80: note = Synthetic: >HM245925_12-cand-1400-1479
  source 1..80: mol_type = other DNA
taatcatgaacaattctacccttttggtgacagtaaagttgtccagaaattgtacaacaaatctggtggcgatgttaaaa

SEQ ID NO: 17665 - DNA, 80 bp, synthetic construct
  misc_feature 1..80: note = Synthetic: >HM245925_12-cand-1480-1559
  source 1..80: mol_type = other DNA
atgtgacctttaacgacactgtggatgttagagaagttgatcctgttttccaggtgaaaattacatatgagtttgatgat

SEQ ID NO: 17666 - DNA, 80 bp, synthetic construct
  misc_feature 1..80: note = Synthetic: >HM245925_12-cand-1560-1639
  source 1..80: mol_type = other DNA
gacactattactaatgttttgaaaacagttattggtaccagtgttacaatagaaggtaacaactgggagctattagatga

SEQ ID NO: 17667 - DNA, 80 bp, synthetic construct
  misc_feature 1..80: note = Synthetic: >HM245925_12-cand-1640-1719
  source 1..80: mol_type = other DNA
tactctgacagaaaaggtcgatgctgtgttttcacaattgcaacaagctggcattgaactaccatcatattacatatatg

SEQ ID NO: 17668 - DNA, 80 bp, synthetic construct
  misc_feature 1..80: note = Synthetic: >HM245925_12-cand-1720-1799
  source 1..80: mol_type = other DNA
attgtgcaggaggttttgatgttggttgcaacgatggtataatgatctcacagtatgatatttgtgttgatgcaccccta

SEQ ID NO: 17669 - DNA, 80 bp, synthetic construct
  misc_feature 1..80: note = Synthetic: >HM245925_12-cand-1800-1879
  source 1..80: mol_type = other DNA
gaaaatgttgaagaagttagtgatgttgaagttgtcgatgacccatctactaatgacactgtgtcagaagtcgtagagga

SEQ ID NO: 17670 - DNA, 80 bp, synthetic construct
  misc_feature 1..80: note = Synthetic: >HM245925_12-cand-1880-1959
  source 1..80: mol_type = other DNA
gcatgttgtagtttctgaagatgttgaaggagttgttgatgagattgtttctgatgtagatgatgaacctatcacagatg

SEQ ID NO: 17671 - DNA, 80 bp, synthetic construct
  misc_feature 1..80: note = Synthetic: >HM245925_12-cand-1960-2039
  source 1..80: mol_type = other DNA
ttatgtcaccattcgcatttccgaatagcatgattaatggcaaagtggtgcttaaacaacaccagaacaattgttggctt

SEQ ID NO: 17672 - DNA, 80 bp, synthetic construct
  misc_feature 1..80: note = Synthetic: >HM245925_12-cand-2040-2119
  source 1..80: mol_type = other DNA
aatgctgcaggttaccagttacagtgtttgaaggctttagaagatgaatctttcaaacaatactgtgctggtgatgttgc

SEQ ID NO: 17673 - DNA, 80 bp, synthetic construct
  misc_feature 1..80: note = Synthetic: >HM245925_12-cand-2120-2199
  source 1..80: mol_type = other DNA
accatttgtgcaattgatgtacgctgtgactaacaggaacattggtgaccttggtgaggcggagtatgttttagagcaac

SEQ ID NO: 17674 - DNA, 80 bp, synthetic construct
  misc_feature 1..80: note = Synthetic: >HM245925_12-cand-2280-2359
  source 1..80: mol_type = other DNA
tgtgtttttagaatgcgctgtactagtgctacctttgactatggtgtctgtggtgtttgtaaaactgttaagaagacaac

SEQ ID NO: 17675 - DNA, 80 bp, synthetic construct
  misc_feature 1..80: note = Synthetic: >HM245925_12-cand-2360-2439
  source 1..80: mol_type = other DNA
tatagttggaattgaaggcactggcgtttttgtgcatgatcctgctaattacaaaccacttgttaaacctgtttgcaaag

SEQ ID NO: 17676 - DNA, 80 bp, synthetic construct
  misc_feature 1..80: note = Synthetic: >HM245925_12-cand-2440-2519
  source 1..80: mol_type = other DNA
caatttttaaaggttcaacaacgggaggtcattatatggtgcatgatgttctggcaaaagtgttagttgatggttttggt

SEQ ID NO: 17677 - DNA, 80 bp, synthetic construct
  misc_feature 1..80: note = Synthetic: >HM245925_12-cand-2520-2599
  source 1..80: mol_type = other DNA
ttgcatccggttcagaatttgccttttacatctgtatgctttgttaatgccaaatatgttaaggaaatttctaaatgtgc

SEQ ID NO: 17678 - DNA, 80 bp, synthetic construct
  misc_feature 1..80: note = Synthetic: >HM245925_12-cand-2600-2679
  source 1..80: mol_type = other DNA
acctaaggctagtgaagacccctgggctaaagctgttgacgtacaagagaaacaaacttctgttgttacatcgtttagcc

SEQ ID NO: 17679 - DNA, 80 bp, synthetic construct
  misc_feature 1..80: note = Synthetic: >HM245925_12-cand-2680-2759
  source 1..80: mol_type = other DNA
aacaagcatgtgaggacaaacctataactgttgagcaaggtacagtacaaacctcaattgagtgcgtagcagaacaatcg

SEQ ID NO: 17680 - DNA, 80 bp, synthetic construct
  misc_feature 1..80: note = Synthetic: >HM245925_12-cand-2760-2839
  source 1..80: mol_type = other DNA
attgttgttgcaacacgcaatcaggagatcacagaggacaaatctataactgttgaccaaggtactgtaaaacccttaat

SEQ ID NO: 17681 - DNA, 80 bp, synthetic construct
  misc_feature 1..80: note = Synthetic: >HM245925_12-cand-2840-2919
  source 1..80: mol_type = other DNA
tactgcaaaaccagcagttgaaccattttttgtcacaggtaatattaaattttacaggggtgatgttaagtctcttgttg

SEQ ID NO: 17682 - DNA, 80 bp, synthetic construct
  misc_feature 1..80: note = Synthetic: >HM245925_12-cand-2920-2999
  source 1..80: mol_type = other DNA
aaaaccttaaacctaaagtattggttaatgcagctaattcccacctacaacataaaggtggtgttgctaaagccatagac

SEQ ID NO: 17683 - DNA, 80 bp, synthetic construct
  misc_feature 1..80: note = Synthetic: >HM245925_12-cand-3000-3079
  source 1..80: mol_type = other DNA
gcctacacaaatggcgctcttactagggagtctgttgaatactttaaacagtacaaacctattccccctggtaacattgt

SEQ ID NO: 17684 - DNA, 80 bp, synthetic construct
  misc_feature 1..80: note = Synthetic: >HM245925_12-cand-3080-3159
  source 1..80: mol_type = other DNA
ggtctttaatgatgtttggaaaggtcttaacatcgctaatgctgtgggaccacgtgtttcagaagagcgttgtgcacaaa

SEQ ID NO: 17685 - DNA, 80 bp, synthetic construct
  misc_feature 1..80: note = Synthetic: >HM245925_12-cand-3160-3239
  source 1..80: mol_type = other DNA
aattggactctgtttatcgcaaaatgactaaaattgaaggtcccattttgacaccacttattagctgtggtgtttttggt

SEQ ID NO: 17686 - DNA, 80 bp, synthetic construct
  misc_feature 1..80: note = Synthetic: >HM245925_12-cand-3240-3319
  source 1..80: mol_type = other DNA
gtgccattggaacaatcattacgctcacttcttgctgcgtttaaacaaaaacctatttgtgtttttgtgtacacagaagc

SEQ ID NO: 17687 - DNA, 80 bp, synthetic construct
  misc_feature 1..80: note = Synthetic: >HM245925_12-cand-3320-3399
  source 1..80: mol_type = other DNA
tgaagaacgtaaggttttggattatttcaaaacacctgtgactgttgtagtaaaagattgtaacaaagtcacaaagaata

SEQ ID NO: 17688 - DNA, 80 bp, synthetic construct
  misc_feature 1..80: note = Synthetic: >HM245925_2-cand-40-119
  source 1..80: mol_type = other DNA
taaacaggttttgcggctattgcttgctattgtgttagtgtggggtttgtttagctgttataatggttacacacccacat

SEQ ID NO: 17689 - DNA, 80 bp, synthetic construct
  misc_feature 1..80: note = Synthetic: >HM245925_4-cand-0-79
  source 1..80: mol_type = other DNA
gtaacaatattgtaagattttgtatgttgtattttgttgcacagttgtttaataattggctgtcttactatggtttggtc

SEQ ID NO: 17690 - DNA, 80 bp, synthetic construct
  misc_feature 1..80: note = Synthetic: >HM245925_4-cand-80-159
  source 1..80: mol_type = other DNA
aattatagttggtttttaaacgtagtttactttgaaactgtggctgcagagttggtggttattatggcggttattaaagt

SEQ ID NO: 17691 - DNA, 80 bp, synthetic construct
  misc_feature 1..80: note = Synthetic: >HM245925_5-cand-0-79
  source 1..80: mol_type = other DNA
gccatttactgttttaaagagggtgttatgaatggtaacattttacaacacaaaacttatgctgacatcgcaccagaaac

SEQ ID NO: 17692 - DNA, 80 bp, synthetic construct
  misc_feature 1..80: note = Synthetic: >HM245925_5-cand-100-179
  source 1..80: mol_type = other DNA
gtaacatgataaagttgcctacaatcataaggggtttgggtctgcgtgttgtacagacgttatctactacatattgcagg

SEQ ID NO: 17693 - DNA, 80 bp, synthetic construct
  misc_feature 1..80: note = Synthetic: >HM245925_6-cand-0-79
  source 1..80: mol_type = other DNA
gcgctgatggtaagcctgtccgccaaggcgagatgaaagactacttcggtgatctagaggatattgttattgatgacatt

SEQ ID NO: 17694 - DNA, 80 bp, synthetic construct
  misc_feature 1..80: note = Synthetic: >HM245925_7-cand-0-79
  source 1..80: mol_type = other DNA
tgcttggtctggtatatgtgcttctgatggtgatagaacctttggtttgattgttaaggatgtgtctttaacattattcc

SEQ ID NO: 17695 - DNA, 80 bp, synthetic construct
  misc_feature 1..80: note = Synthetic: >HM245925_7-cand-130-209
  source 1..80: mol_type = other DNA
cgaatcgccactagtgcagattttgtacagatagcagattgtgatgtcttgtttgttaatgctactatattagagctgcc

SEQ ID NO: 17696 - DNA, 80 bp, synthetic construct
  misc_feature 1..80: note = Synthetic: >HM245925_7-cand-180-259
  source 1..80: mol_type = other DNA
gtttgttaatgctactatattagagctgcctagtataatacctgattacattgatattaataagacggtacaggatttgc

SEQ ID NO: 17697 - DNA, 80 bp, synthetic construct
  misc_feature 1..80: note = Synthetic: >HM245925_8-cand-0-79
  source 1..80: mol_type = other DNA
cactcgttacaattttgatgttacagataaaaagtatagttgtaaagaagtcttaaagtccttacagttgcttgatgatt

SEQ ID NO: 17698 - DNA, 80 bp, synthetic construct
  misc_feature 1..80: note = Synthetic: >HM245925_8-cand-160-239
  source 1..80: mol_type = other DNA
cctataaaactagtaaacagagatctcatacaatcattgacggttgattttaatggtgttctgttagaagcgcataagcg

SEQ ID NO: 17699 - DNA, 80 bp, synthetic construct
  misc_feature 1..80: note = Synthetic: >HM245925_8-cand-210-289
  source 1..80: mol_type = other DNA
taatggtgttctgttagaagcgcataagcgtgttgtgggtaactccttcaatgttgatgtttctaactgtaaaactttac

SEQ ID NO: 17700 - DNA, 80 bp, synthetic construct
  misc_feature 1..80: note = Synthetic: >HM245925_9-cand-0-79
  source 1..80: mol_type = other DNA
ttggatttgtaaacaagacatttgttacactacctgctaattttgatcatgtgtatgtcaatattactggtaatgtcaga

SEQ ID NO: 17701 - DNA, 80 bp, synthetic construct
  misc_feature 1..80: note = Synthetic: >HM245925_9-cand-130-209
  source 1..80: mol_type = other DNA
aagttttcaaggttgtattgacgtttctcaatttacagtcaatgtaaaccacacttgcacactaattgatgcaaacggtc

SEQ ID NO: 17702 - DNA, 80 bp, synthetic construct
  misc_feature 1..80: note = Synthetic: >HM245925_9-cand-180-259
  source 1..80: mol_type = other DNA
acacttgcacactaattgatgcaaacggtcagtgtactggtgcttatgaagccagggtttatgtaactagtggtagttgt

SEQ ID NO: 17703 - DNA, 80 bp, synthetic construct
  misc_feature 1..80: note = Synthetic: >HM245925_9-cand-310-389
  source 1..80: mol_type = other DNA
tttttcacctgtgccattgggtgatgattgccgcttagacttgactgttcaaacccgttatttcactggtgtgtttgctc

SEQ ID NO: 17704 - DNA, 80 bp, synthetic construct
  misc_feature 1..80: note = Synthetic: >HM245926_1-cand-40-119
  source 1..80: mol_type = other DNA
taaacaggtcttgcgtctactgctggccattgtgttagtatggggtttgtttagctgttacaatggttatacacctacat

SEQ ID NO: 17705 - DNA, 80 bp, synthetic construct
  misc_feature 1..80: note = Synthetic: >HM245926_10-cand-0-79
  source 1..80: mol_type = other DNA
ttacaggcaacattaagttttacaggggtgatgttaaatctcttgttgaaaacattaaacctaaggttttagtcaatgca

SEQ ID NO: 17706 - DNA, 80 bp, synthetic construct
  misc_feature 1..80: note = Synthetic: >HM245926_10-cand-50-129
  source 1..80: mol_type = other DNA
aacattaaacctaaggttttagtcaatgcagctaattcccacctacagcacaaaggtggtgttgctaaagccatagatga

SEQ ID NO: 17707 - DNA, 80 bp, synthetic construct
  misc_feature 1..80: note = Synthetic: >HM245926_10-cand-130-209
  source 1..80: mol_type = other DNA
ttacacaaaaggtgctcttactaaggagtctgttgaatactttaaacattacaaacctattcctcctggtaatatagtgg

SEQ ID NO: 17708 - DNA, 80 bp, synthetic construct
  misc_feature 1..80: note = Synthetic: >HM245926_10-cand-210-289
  source 1..80: mol_type = other DNA
tctttaacgacgtttggaatggtcttaacattgccaatgccgttggaccacgtgtctcagaagagcgctgtgaacaaaaa

SEQ ID NO: 17709 - DNA, 80 bp, synthetic construct
  misc_feature 1..80: note = Synthetic: >HM245926_10-cand-290-369
  source 1..80: mol_type = other DNA
ttgagctctgtttatcgcaaaatgactaaaattgatggtcctattttaacaccacttattagttgcggcatctttggtgt

SEQ ID NO: 17710 - DNA, 80 bp, synthetic construct
  misc_feature 1..80: note = Synthetic: >HM245926_10-cand-370-449
  source 1..80: mol_type = other DNA
gccattggaacaatcactacgttcacttcttgctgctttcaagcaaaaacctgtttgtgtttttgtatatacagaagctg

SEQ ID NO: 17711 - DNA, 80 bp, synthetic construct
  misc_feature 1..80: note = Synthetic: >HM245926_10-cand-450-529
  source 1..80: mol_type = other DNA
aagaacgtaaggttttagattatttcaaaacacctgtgactgttgtagtaaaagactgtaacaaagtcacaaagactact

SEQ ID NO: 17712 - DNA, 80 bp, synthetic construct
  misc_feature 1..80: note = Synthetic: >HM245926_10-cand-610-689
  source 1..80: mol_type = other DNA
agatctttcaatgtctcaagccacaattacaaaggtagctgatgtagattggtgtagccattacggctttgagaatgctg

SEQ ID NO: 17713 - DNA, 80 bp, synthetic construct
  misc_feature 1..80: note = Synthetic: >HM245926_10-cand-700-779
  source 1..80: mol_type = other DNA
tgcatctgaccattcagattacaagtttgagagtgccattgttaatgacaaaattgtgtttaagcagagtgataacaatt

SEQ ID NO: 17714 - DNA, 80 bp, synthetic construct
  misc_feature 1..80: note = Synthetic: >HM245926_10-cand-790-869
  source 1..80: mol_type = other DNA
ctctctgtgtttgttgttgcaggattataaacctagctggcggtttcccggtatggaagatctttggtctaaatttgtta

SEQ ID NO: 17715 - DNA, 80 bp, synthetic construct
  misc_feature 1..80: note = Synthetic: >HM245926_10-cand-870-949
  source 1..80: mol_type = other DNA
gtggtaacacagaagcatttgtacactgtttgtattttatcaccggcgctacgaaaggtcaacctaatgatgtggaactt

SEQ ID NO: 17716 - DNA, 80 bp, synthetic construct
  misc_feature 1..80: note = Synthetic: >HM245926_10-cand-950-1029
  source 1..80: mol_type = other DNA
gcacttcacaaattagaacctttattgtgctctagtgggtctgtcatcttggacgaatttagtggttgcgactattgtta

SEQ ID NO: 17717 - DNA, 80 bp, synthetic construct
  misc_feature 1..80: note = Synthetic: >HM245926_10-cand-1030-1109
  source 1..80: mol_type = other DNA
taatcgtagcactgtaaatggtcctatagtagcagcaccactacaaacattgggcgataaagcagtttgtagacatggtg

SEQ ID NO: 17718 - DNA, 80 bp, synthetic construct
  misc_feature 1..80: note = Synthetic: >HM245926_10-cand-1120-1199
  source 1..80: mol_type = other DNA
aacacgagtgcacaaaattcaaggttccattattttgacatcaattaatggttctgtcacagattgtttgagaggtgatg

SEQ ID NO: 17719 - DNA, 80 bp, synthetic construct
  misc_feature 1..80: note = Synthetic: >HM245926_10-cand-1300-1379
  source 1..80: mol_type = other DNA
ccttagtgttactacagttttaatttcaaatggttatactgttccagtggtacaatcaccgaggattactagagacctgc

SEQ ID NO: 17720 - DNA, 80 bp, synthetic construct
  misc_feature 1..80: note = Synthetic: >HM245926_11-cand-0-79
  source 1..80: mol_type = other DNA
ccatggtttgttaaaagatgtggtgccttatttgagacagcctggcagtctatttgtaaatttttaagtgctggtggttt

SEQ ID NO: 17721 - DNA, 80 bp, synthetic construct
  misc_feature 1..80: note = Synthetic: >HM245926_11-cand-80-159
  source 1..80: mol_type = other DNA
cacttatgtagctataagggacaccatcagtgcaatttgctcaatttgttttactattaaggagtcaaaacctttgttta

SEQ ID NO: 17722 - DNA, 80 bp, synthetic construct
  misc_feature 1..80: note = Synthetic: >HM245926_11-cand-460-539
  source 1..80: mol_type = other DNA
ttgttcaacctggaccaggctatgctgttgttataggcggtatggccttttattgcactggtgattactactttatgatg

SEQ ID NO: 17723 - DNA, 80 bp, synthetic construct
  misc_feature 1..80: note = Synthetic: >HM245926_11-cand-540-619
  source 1..80: mol_type = other DNA
tcatcacctactagcgttatcacaacatctgtcttcaaggcttccatattcaacgcattttgtttgcgatacgacgtaga

SEQ ID NO: 17724 - DNA, 80 bp, synthetic construct
  misc_feature 1..80: note = Synthetic: >HM245926_11-cand-620-699
  source 1..80: mol_type = other DNA
ggactcgtacaaagttaagcttgttgcaaagtttggtaatgtgtactctgctaatggttgtgctgatgatgcagttgaat

SEQ ID NO: 17725 - DNA, 80 bp, synthetic construct
  misc_feature 1..80: note = Synthetic: >HM245926_11-cand-700-779
  source 1..80: mol_type = other DNA
ctcttaatgtggctctgaaagaattttacagcaatggtgtgtgctttaaggcctatacagacaaagacgtcatcgttgta

SEQ ID NO: 17726 - DNA, 80 bp, synthetic construct
  misc_feature 1..80: note = Synthetic: >HM245926_11-cand-940-1019
  source 1..80: mol_type = other DNA
tattgtgtcctaaagtcctatttaggttggacaatggtatcatatggtacagacatctcaggagtgttaaaaactgtaaa

SEQ ID NO: 17727 - DNA, 80 bp, synthetic construct
  misc_feature 1..80: note = Synthetic: >HM245926_11-cand-1030-1109
  source 1..80: mol_type = other DNA
taacgtgtacttttacaggtggacttattaagttgttgttagatggctatgatgctcttgctggtatgataacgcgtggt

SEQ ID NO: 17728 - DNA, 80 bp, synthetic construct
  misc_feature 1..80: note = Synthetic: >HM245926_11-cand-1110-1189
  source 1..80: mol_type = other DNA
tatcaacaactttgcaaggcgaagccatttaagcttgatgtcgctggtatgacgctgagtggttttacaacaccaattgg

SEQ ID NO: 17729 - DNA, 80 bp, synthetic construct
  misc_feature 1..80: note = Synthetic: >HM245926_11-cand-1190-1269
  source 1..80: mol_type = other DNA
tcgtgacttcctagactttggtgaggatgttgttgaaatcttctgtggtggtaaaacacgctgtttttcaggcgctagca

SEQ ID NO: 17730 - DNA, 80 bp, synthetic construct
  misc_feature 1..80: note = Synthetic: >HM245926_11-cand-1280-1359
  source 1..80: mol_type = other DNA
tgtcgataaagttgttgaagatgatgtctggtctacaattattttggaggagactgagtatcagccaccaaagaatgggg

SEQ ID NO: 17731 - DNA, 80 bp, synthetic construct
  misc_feature 1..80: note = Synthetic: >HM245926_11-cand-1360-1439
  source 1..80: mol_type = other DNA
gtgttgtggtagttataggtggttacacattctatactaccaatcatgaacagttctacccctttggtgatagtaaagtt

SEQ ID NO: 17732 - DNA, 80 bp, synthetic construct
  misc_feature 1..80: note = Synthetic: >HM245926_3-cand-20-99
  source 1..80: mol_type = other DNA
atgggatcacgcttagagtctatggagctggagtctatgatatcaatttcagcaaatgctttgaagctggcatctgttga

SEQ ID NO: 17733 - DNA, 80 bp, synthetic construct
  misc_feature 1..80: note = Synthetic: >HM245926_4-cand-0-79
  source 1..80: mol_type = other DNA
aattgctaggcaaacctataaaactagtaaatagagatctcatacaatcgttgacagttgattttaatggtgttttgtta

SEQ ID NO: 17734 - DNA, 80 bp, synthetic construct
  misc_feature 1..80: note = Synthetic: >HM245926_4-cand-80-159
  source 1..80: mol_type = other DNA
gaagcacataaacgcgttgtgggtaactccttcaatgtagatgtttctaactgtaaaactttacgtgagtgctatgatgc

SEQ ID NO: 17735 - DNA, 80 bp, synthetic construct
  misc_feature 1..80: note = Synthetic: >HM245926_5-cand-0-79
  source 1..80: mol_type = other DNA
gcgctgatggtaagcctgttcgtcaaggcgatatgaaggactacttcggtgatctagaggaaattgttattgatggcatt

SEQ ID NO: 17736 - DNA, 80 bp, synthetic construct
  misc_feature 1..80: note = Synthetic: >HM245926_6-cand-0-79
  source 1..80: mol_type = other DNA
gtaacaacattgtaagattttgtatgttgtatttcgttgcacagttatttaataattggctatcttattacggtttagtc

SEQ ID NO: 17737 - DNA, 80 bp, synthetic construct
  misc_feature 1..80: note = Synthetic: >HM245926_6-cand-70-149
  source 1..80: mol_type = other DNA
cggtttagtcaattatagttggtttttaaacatggtatacttcgaaactgtggccgcggagttggtggttattatggcag

SEQ ID NO: 17738 - DNA, 80 bp, synthetic construct
  misc_feature 1..80: note = Synthetic: >HM245926_6-cand-220-299
  source 1..80: mol_type = other DNA
caaaattgcgaagcaaaatcgtatacctgttaacgtggttgttaatggtagtatcaaatcagtctatgttcatactaatg

SEQ ID NO: 17739 - DNA, 80 bp, synthetic construct
  misc_feature 1..80: note = Synthetic: >HM245926_7-cand-170-249
  source 1..80: mol_type = other DNA
ataactaatgcaggtagtagtggttgtacaaatgcctatgaagctaatgtttatatgactagtggtagttgtccatttgc

SEQ ID NO: 17740 - DNA, 80 bp, synthetic construct
  misc_feature 1..80: note = Synthetic: >HM245926_7-cand-300-379
  source 1..80: mol_type = other DNA
ccgtgccattgggtgatgattgccgtttagacctgactgttcaaacacggtattttactggtgtgtttgctcatgtgtac

SEQ ID NO: 17741 - DNA, 80 bp, synthetic construct
  misc_feature 1..80: note = Synthetic: >HM245926_8-cand-0-79
  source 1..80: mol_type = other DNA
cagacgttgttttgggtgactatttccctactgtagaaccatggcacaattgtttacttgaacaaactaatagtaccgtt

SEQ ID NO: 17742 - DNA, 80 bp, synthetic construct
  misc_feature 1..80: note = Synthetic: >HM245926_8-cand-90-169
  source 1..80: mol_type = other DNA
gtttaagagcactatattgggattataataatggccaagtccctgttaggcgttacttagctgtggctgtctatggggac

SEQ ID NO: 17743 - DNA, 80 bp, synthetic construct
  misc_feature 1..80: note = Synthetic: >HM245926_8-cand-180-259
  source 1..80: mol_type = other DNA
tcagtgtatatttcacactagactatgaaggtccacgaggtgctaaaatttgtctatgtaagggcatgccacaacccacg

SEQ ID NO: 17744 - DNA, 80 bp, synthetic construct
  misc_feature 1..80: note = Synthetic: >HM245926_8-cand-270-349
  source 1..80: mol_type = other DNA
gcgaagcgaattgctggagtagtcagtgcaaacttaaccactattttcctatttgtaataacactgatcattgtggtcat

SEQ ID NO: 17745 - DNA, 80 bp, synthetic construct
  misc_feature 1..80: note = Synthetic: >HM245926_8-cand-360-439
  source 1..80: mol_type = other DNA
gcttgaagtggtctcagacagagttgtttgcgtacttgtatggttatgtgtataacataaagcttgtaaaccattggttt

SEQ ID NO: 17746 - DNA, 80 bp, synthetic construct
  misc_feature 1..80: note = Synthetic: >HM245926_8-cand-460-539
  source 1..80: mol_type = other DNA
tatgagagccgccagtgttggacaggaaggctggtggtttaaccctgttcgcaatttaacatattatagtgtttataaga

SEQ ID NO: 17747 - DNA, 80 bp, synthetic construct
  misc_feature 1..80: note = Synthetic: >HM245926_9-cand-0-79
  source 1..80: mol_type = other DNA
tatgatatttgtagtgatacacctctagaaaatgttgaagaagttaatgatgttgaagttatcaatgactcatctattac

SEQ ID NO: 17748 - DNA, 80 bp, synthetic construct
  misc_feature 1..80: note = Synthetic: >HM245926_9-cand-90-169
  source 1..80: mol_type = other DNA
tcagaagttacagacgagcctattgtagtgtctgaagatgttgaagaagttgttgatgaaattgtttctgatgtggaaga

SEQ ID NO: 17749 - DNA, 80 bp, synthetic construct
  misc_feature 1..80: note = Synthetic: >HM245926_9-cand-160-239
  source 1..80: mol_type = other DNA
atgtggaagacgaaaccgtcacagatgatgacattgtatcaccattcgcatttccgaatagtatgattaatggcaaagtt

SEQ ID NO: 17750 - DNA, 80 bp, synthetic construct
  misc_feature 1..80: note = Synthetic: >HM245926_9-cand-250-329
  source 1..80: mol_type = other DNA
aacatcagaacaattgctggcttaatgctgcaggttaccaattacaatgtttgaatgttttagaagatgaatctttcaaa

SEQ ID NO: 17751 - DNA, 80 bp, synthetic construct
  misc_feature 1..80: note = Synthetic: >HM245926_9-cand-340-419
  source 1..80: mol_type = other DNA
caggtaacgtcgcaacatttgtgcaattgatgtatgctgtgactaatagaaatattggtgatcttggtgaagcggagtat

SEQ ID NO: 17752 - DNA, 80 bp, synthetic construct
  misc_feature 1..80: note = Synthetic: >HM245926_9-cand-550-629
  source 1..80: mol_type = other DNA
actacggtttttgtggtgtttgtaacactgttaagaaaacaaccatagttggaattgaaggcaccggtgtttttgtgcat

SEQ ID NO: 17753 - DNA, 80 bp, synthetic construct
  misc_feature 1..80: note = Synthetic: >HM245926_9-cand-640-719
  source 1..80: mol_type = other DNA
attataaaccaattgttaagcctgtttgcaaagcaatttttaaaggttcaacaacaggaggtcactatatggtgcatgat

SEQ ID NO: 17754 - DNA, 80 bp, synthetic construct
  misc_feature 1..80: note = Synthetic: >HQ012367_1-cand-40-119
  source 1..80: mol_type = other DNA
gactttcttgaacactacatatacgacatttcaggagattgtgattgattatattgatatcaacaagactatcgctgata

SEQ ID NO: 17755 - DNA, 80 bp, synthetic construct
  misc_feature 1..80: note = Synthetic: >HQ012367_2-cand-640-719
  source 1..80: mol_type = other DNA
tttgatgtgaatccagctgttgcgggttgtaagtggtcgttagtccatgatgttaagtggcgcacgcagtttgccactat

SEQ ID NO: 17756 - DNA, 80 bp, synthetic construct
  misc_feature 1..80: note = Synthetic: >HQ012367_2-cand-910-989
  source 1..80: mol_type = other DNA
gacttgcttgcatttaaaaacagcactactggtgaaatttacaccgtagtgccatgtgatttaacagctcaagctgtagt

SEQ ID NO: 17757 - DNA, 80 bp, synthetic construct
  misc_feature 1..80: note = Synthetic: >HQ012368_1-cand-130-209
  source 1..80: mol_type = other DNA
tgtccatggtgtctattttgatgtaagagaacataactctgatggtgtgtgggatttaagagacagagttggtctattga

SEQ ID NO: 17758 - DNA, 80 bp, synthetic construct
  misc_feature 1..80: note = Synthetic: >HQ012368_1-cand-230-309
  source 1..80: mol_type = other DNA
cgctatagtctactaatggttttgcaagacggagtggaagcgaatcagcctcatgtcgctgttaaaatttgtcattggca

SEQ ID NO: 17759 - DNA, 80 bp, synthetic construct
  misc_feature 1..80: note = Synthetic: >HQ012368_1-cand-330-409
  source 1..80: mol_type = other DNA
accatgaattttctcttaatttgggagataacggccaatgtgtgttcaagcagaaattttcattggacaccgtgttgact

SEQ ID NO: 17760 - DNA, 80 bp, synthetic construct; identical to SEQ ID NO: 17160
  misc_feature 1..80: note = Synthetic: >HQ012368_2-cand-360-439
  source 1..80: mol_type = other DNA

SEQ ID NO: 17761 - DNA, 80 bp, synthetic construct
  misc_feature 1..80: note = Synthetic: >HQ012368_2-cand-450-529
  source 1..80: mol_type = other DNA
gccatgtgatttaacagcacaagcagctgtgattaacgacgagatagtgggagctataacagctgttaatcaaactgatt

SEQ ID NO: 17762 - DNA, 80 bp, synthetic construct
  misc_feature 1..80: note = Synthetic: >HQ012368_2-cand-540-619
  source 1..80: mol_type = other DNA
tgtagatcacacacatccgagaagatcacgtaggtcggcaycaaamtcagtaaccacctatactatgccacaattctatt

SEQ ID NO: 17763 - DNA, 80 bp, synthetic construct
  misc_feature 1..80: note = Synthetic: >HQ012368_2-cand-720-799
  source 1..80: mol_type = other DNA
tgttactcatgttgaaaccgtggatgatactataggcgttatcaaacctatttcaacaggcaacatatctatacccaaaa

SEQ ID NO: 17764 - DNA, 80 bp, synthetic construct
  misc_feature 1..80: note = Synthetic: >HQ012369_1-cand-200-279
  source 1..80: mol_type = other DNA
tgttatagcagtgctaatgttacggatttacagcctgcaaatatcagcatctctcatattctctttggcaaaactacgta

SEQ ID NO: 17765 - DNA, 80 bp, synthetic construct
  misc_feature 1..80: note = Synthetic: >HQ012369_1-cand-460-539
  source 1..80: mol_type = other DNA
ttatggcttttggactatagcctacactacttatacagatgtaatggtagatgttaatggcacaggtattactaggttat

SEQ ID NO: 17766 - DNA, 80 bp, synthetic construct
  misc_feature 1..80: note = Synthetic: >HQ012369_1-cand-550-629
  source 1..80: mol_type = other DNA
ctcacccatcaatagaatcaagtgccaacagttgaagcatgaattaccagatggtttctattctgctagcgcgcttgtta

SEQ ID NO: 17767 - DNA, 80 bp, synthetic construct
  misc_feature 1..80: note = Synthetic: >HQ012369_1-cand-640-719
  source 1..80: mol_type = other DNA
acccaaaacatttgttaccttgccacagttttacaattgtatgaatgttacgctacatgtcgttttaaatgacactgaga

SEQ ID NO: 17768 - DNA, 80 bp, synthetic construct
  misc_feature 1..80: note = Synthetic: >HQ012369_1-cand-730-809
  source 1..80: mol_type = other DNA
cattattcttgctaatgctccagaattagcatcacttgctgacatacatttcgaaatagcccaggctaatggcagtgtaa

SEQ ID NO: 17769 - DNA, 80 bp, synthetic construct
  misc_feature 1..80: note = Synthetic: >HQ012369_1-cand-810-889
  source 1..80: mol_type = other DNA
ctaatgttactagtctatgtgttcagacgagacagttagctttattctacaagtacactagcttacaaggtttgtacact

SEQ ID NO: 17770 - DNA, 80 bp, synthetic construct
  misc_feature 1..80: note = Synthetic: >HQ012369_1-cand-1160-1239
  source 1..80: mol_type = other DNA
aacatatatggatttcatggcacaggcattattagaaataccacctcacgtttggtggctggcctttactacacatccat

SEQ ID NO: 17771 - DNA, 80 bp, synthetic construct
  misc_feature 1..80: note = Synthetic: >HQ012370_2-cand-80-159
  source 1..80: mol_type = other DNA
tacaacctattaagagtgttaatttctccatcagttctgtagagaactatggtttttggactatagcctacactaactat

SEQ ID NO: 17772 - DNA, 80 bp, synthetic construct
  misc_feature 1..80: note = Synthetic: >HQ012370_3-cand-0-79
  source 1..80: mol_type = other DNA
ggctttattttataagtatactagcttacaaggcttgtatacttattctaatttagtggagttacaaaactatgactgcc

SEQ ID NO: 17773 - DNA, 80 bp, synthetic construct
  misc_feature 1..80: note = Synthetic: >HQ012370_3-cand-90-169
  source 1..80: mol_type = other DNA
acagcagtttaataattatttgcagttcgaaactttgtgttttgacgtgaacccagctgtggcaggttgtaagtgggcgt

SEQ ID NO: 17774 - DNA, 80 bp, synthetic construct
  misc_feature 1..80: note = Synthetic: >HQ012370_3-cand-190-269
  source 1..80: mol_type = other DNA
cgtacgcattttgccaccatcactgtatcttataaagaaggtgctatgattactaccatgccaaaagcacagatgggttt

SEQ ID NO: 17775 - DNA, 80 bp, synthetic construct
  misc_feature 1..80: note = Synthetic: >HQ012370_3-cand-280-359
  source 1..80: mol_type = other DNA
tccatcgtggtaaaaaatcaatgcactgattacaacatatatggattccagggcacaggtattattagaaataccacctc

SEQ ID NO: 17776 - DNA, 80 bp, synthetic construct
  misc_feature 1..80: note = Synthetic: >HQ012370_3-cand-370-449
  source 1..80: mol_type = other DNA
gctggcctttattacacatctactagtggtgacctcctcgcttttaaaaatagtactaatggtgaaattttcactgtagt

SEQ ID NO: 17777 - DNA, 80 bp, synthetic construct
  misc_feature 1..80: note = Synthetic: >HQ012371_1-cand-150-229
  source 1..80: mol_type = other DNA
atagaaaatgcccttaatcttggtgcacgcctygaatctttaatgcttaatgacatgatcacagtttcagctcgtagtct

SEQ ID NO: 17778 - DNA, 80 bp, synthetic construct
  misc_feature 1..80: note = Synthetic: >HQ012371_2-cand-0-79
  source 1..80: mol_type = other DNA
atgttgccgttaaaatctgccattggaaaccaggtaacataagttcttaccacgaatttaaagttgatctaggagatggt

SEQ ID NO: 17779 - DNA, 80 bp, synthetic construct
  misc_feature 1..80: note = Synthetic: >HQ012371_2-cand-320-399
  source 1..80: mol_type = other DNA
actggtggttcaaattacacacacttacagcttaaagaatgcagtagtgattattgcgctggttatgctaagaatgtctt

SEQ ID NO: 17780 - DNA, 80 bp, synthetic construct
  misc_feature 1..80: note = Synthetic: >HQ012371_2-cand-430-509
  source 1..80: mol_type = other DNA
ctttactttcagcaactggtttttgttaacagataaatccactttattgcaagggcgtgttcttagtagtcagccagttt

SEQ ID NO: 17781 - DNA, 80 bp, synthetic construct
  misc_feature 1..80: note = Synthetic: >HQ012372_2-cand-360-439
  source 1..80: mol_type = other DNA
tgttacggatttccagcctgcaactaacagcatctctcatattccctttggcaaaactacgtgttcatatttttgttttg

SEQ ID NO: 17782 - DNA, 80 bp, synthetic construct
  misc_feature 1..80: note = Synthetic: >HQ392469_1-cand-70-149
  source 1..80: mol_type = other DNA
tggattgtgctaggtatgtttgcaatggcaatagacattgtctcaacttgctaacacaatacacctcggcttgtcaaaca

SEQ ID NO: 17783 - DNA, 80 bp, synthetic construct
  misc_feature 1..80: note = Synthetic: >HQ392469_1-cand-220-299
  source 1..80: mol_type = other DNA
atcgtagtctggaactcgcaactgttgaaaagtttaatactactgttttaggtggtgaaaagctgggtggtttttatttt

SEQ ID NO: 17784 - DNA, 80 bp, synthetic construct
  misc_feature 1..80: note = Synthetic: >HQ392469_2-cand-0-79
  source 1..80: mol_type = other DNA
cagaaactattcttggtggctatctaccatattgtgatactggtgttaactgtggctggtacaactttgtgtacagaacg

SEQ ID NO: 17785 - DNA, 80 bp, synthetic construct
  misc_feature 1..80: note = Synthetic: >HQ392469_2-cand-100-179
  source 1..80: mol_type = other DNA
atactcttacataaacacaaaaaatttgaacataccgaatgttcatggcgtctacttcgacgtacgggaacatgattctg

SEQ ID NO: 17786 - DNA, 80 bp, synthetic construct
  misc_feature 1..80: note = Synthetic: >HQ392469_2-cand-200-279
  source 1..80: mol_type = other DNA
gatagagtcggcttattgatagctatacatggcacctcacattatagtctgctaatggttttacaagatgrtgtggagga

SEQ ID NO: 17787 - DNA, 80 bp, synthetic construct
  misc_feature 1..80: note = Synthetic: >HQ392469_2-cand-300-379
  source 1..80: mol_type = other DNA
tcaaaatctgccattggaagccaggcaatataagttcctatcaccagtttagccttaacctaggagatggaggtcaatgt

SEQ ID NO: 17788 - DNA, 80 bp, synthetic construct
  misc_feature 1..80: note = Synthetic: >HQ392470_1-cand-80-159
  source 1..80: mol_type = other DNA
cacctattaggagtgttaacttctccatcagttccgtagagaactacggtttttggactatagcctatactaactataca

SEQ ID NO: 17789 - DNA, 80 bp, synthetic construct
  misc_feature 1..80: note = Synthetic: >HQ392470_1-cand-640-719
  source 1..80: mol_type = other DNA
tttgatgtgaatccagctattgcgggttgtaagtggtcgctagtccatgatgttaggtggcgcacgcagtttgccactat

SEQ ID NO: 17790 - DNA, 80 bp, synthetic construct
  misc_feature 1..80: note = Synthetic: >HQ392470_1-cand-910-989
  source 1..80: mol_type = other DNA
gacttgcttgcatttaaaaacagcactacaggtgaaatttacaccgtagtgccatgtgatttaacagctcaagctgcagt

SEQ ID NO: 17791 - DNA, 80 bp, synthetic construct
  misc_feature 1..80: note = Synthetic: >HQ392471_1-cand-40-119
  source 1..80: mol_type = other DNA
tgacttttctgaacactacatatacgagttttcaggagattgtgattgattatattgacattaacaakactattgctgat

SEQ ID NO: 17792 - DNA, 80 bp, synthetic construct
  misc_feature 1..80: note = Synthetic: >HQ392471_2-cand-40-119
  source 1..80: mol_type = other DNA
ttctatggcttccagtggactaacacatatgtagacatatacttagggggtaccattactaaggtatgggttaacaatga

SEQ ID NO: 17793 - DNA, 80 bp, synthetic construct
  misc_feature 1..80: note = Synthetic: >HQ392471_3-cand-0-79
  source 1..80: mol_type = other DNA
catcctcccaccaactgtgcgggagcttgcatttggcagagatggatccatttttgttaatggctacaaatattttagct

SEQ ID NO: 17794 - DNA, 80 bp, synthetic construct
  misc_feature 1..80: note = Synthetic: >HQ392471_3-cand-180-259
  source 1..80: mol_type = other DNA
taatggcactggtatttccaggttgttctattgcgactcacccatcaatagaatcaagtgtcaacaattgaagcatgact

SEQ ID NO: 17795 - DNA, 80 bp, synthetic construct
  misc_feature 1..80: note = Synthetic: >HQ392471_3-cand-360-439
  source 1..80: mol_type = other DNA
acacgtcgtgttgaacgacacggagaagaaaacggatatcattttagctaaggcccccgaattagcttcacttgctgata

SEQ ID NO: 17796 - DNA, 80 bp, synthetic construct
  misc_feature 1..80: note = Synthetic: >HQ392471_3-cand-450-529
  source 1..80: mol_type = other DNA
aatagctctggctaatggaagtattgtgaatgtcagtagcgtatgtgtccagacgagacagttggcattattttacaaat

SEQ ID NO: 17797 - DNA, 80 bp, synthetic construct
  misc_feature 1..80: note = Synthetic: >HQ392471_3-cand-540-619
  source 1..80: mol_type = other DNA
acaaggtttgtatacttactctaatctggtggagctacaaaatcatgactgcccatttgcgccacagcagtttaacaatt

SEQ ID NO: 17798 - DNA, 80 bp, synthetic construct
  misc_feature 1..80: note = Synthetic: >HQ392471_3-cand-720-799
  source 1..80: mol_type = other DNA
tattactgtttcttacaaagatggtgctatgattacaaccatgccgagggcgcagctgggttttcaagatatttccaatt

SEQ ID NO: 17799 - DNA, 80 bp, synthetic construct
  misc_feature 1..80: note = Synthetic: >HQ392472_1-cand-10-89
  source 1..80: mol_type = other DNA
taaaatctgccattggaaaccaggtaatataagttcttaccacgaatttaaagttgatctaggagatagtggtcaatgtg

SEQ ID NO: 17800 - DNA, 80 bp, synthetic construct
  misc_feature 1..80: note = Synthetic: >HQ392472_2-cand-360-439
  source 1..80: mol_type = other DNA
acatgttgtattaaatgacacattgaaacagtatgacattaaggctcctgagctagcatcacttgctgacatacactttg

SEQ ID NO: 17801 - DNA, 80 bp, synthetic construct
  misc_feature 1..80: note = Synthetic: >JN183882_2-cand-0-79
  source 1..80: mol_type = other DNA
ctatttgtaatactggtgaaattaaatatgttaatgtcactcgtgttgaaattgtggacgatggtataggcgttattaaa

SEQ ID NO: 17802 - DNA, 80 bp, synthetic construct
  misc_feature 1..80: note = Synthetic: >JN183882_3-cand-200-279
  source 1..80: mol_type = other DNA
gaccgtgtcggtttgttaattttagtgcgtggaaaatcgcagtacagtctacttatggttttagacgatgatgtggaagc

SEQ ID NO: 17803 - DNA, 80 bp, synthetic construct
  misc_feature 1..80: note = Synthetic: >JN183882_4-cand-0-79
  source 1..80: mol_type = other DNA
catacttccaccaaccgtacgagaatttgcattcggcagagatggatctatttttgttaatggttataaatatttcagtt

SEQ ID NO: 17804 - DNA, 80 bp, synthetic construct
  misc_feature 1..80: note = Synthetic: >JN183882_4-cand-250-329
  source 1..80: mol_type = other DNA
aagcatgaactaccagacggtttctattctgctagcatgcttgttaaaaaggagctacccaaaacatttgttactatgcc

SEQ ID NO: 17805 - DNA, 80 bp, synthetic construct
  misc_feature 1..80: note = Synthetic: >JN183882_4-cand-340-419
  source 1..80: mol_type = other DNA
aactggatgaatgtcacattacacgttgtcttaaacgacacagagaaagggagcgacatcattcttgctaaggctaatga

SEQ ID NO: 17806 - DNA, 80 bp, synthetic construct
  misc_feature 1..80: note = Synthetic: >JN183882_4-cand-400-479
  source 1..80: mol_type = other DNA
attcttgctaaggctaatgagctagcatcacttgcagacatacattttgaaatagcccaggctaatggcagtgtaactaa

SEQ ID NO: 17807 - DNA, 80 bp, synthetic construct
  misc_feature 1..80: note = Synthetic: >JN183882_4-cand-490-569
  source 1..80: mol_type = other DNA
ctatgtgttcaggccagacaggtggctctattttataagtatactagcttacaaggcttgtatacctattccaacttggt

SEQ ID NO: 17808 - DNA, 80 bp, synthetic construct
  misc_feature 1..80: note = Synthetic: >JN183882_4-cand-670-749
  source 1..80: mol_type = other DNA
tgtaagtggtcgttagtccatgataacaggtggcgcacacagttcgctactatcactgtttcttataaagatggtgccat

SEQ ID NO: 17809 - DNA, 80 bp, synthetic construct
  misc_feature 1..80: note = Synthetic: >JN183882_4-cand-760-839
  source 1..80: mol_type = other DNA
atgccgcaagcgcatattggttttcaagacatttcacatttggtaaaagatgaatgtactgattacaacatatatggatt

SEQ ID NO: 17810 - DNA, 80 bp, synthetic construct
  misc_feature 1..80: note = Synthetic: >JN183883_2-cand-0-79
  source 1..80: mol_type = other DNA
gccgttaaaatatgccattggcagccaggtaacataagttcctaccatcaatttgatttaaatctaggagatggtggtca

SEQ ID NO: 17811 - DNA, 80 bp, synthetic construct
  misc_feature 1..80: note = Synthetic: >JN183883_2-cand-130-209
  source 1..80: mol_type = other DNA
acttctatggtttccagtggactgaaacctatgtagacatttacttaggtggcactattactaaagtgtgggttgaaaac

SEQ ID NO: 17812 - DNA, 80 bp, synthetic construct
  misc_feature 1..80: note = Synthetic: >JN183883_3-cand-0-79
  source 1..80: mol_type = other DNA
ggctttattctacaagtacactagccgacaaggtttgtacacctattctaatctggtggagttacaaaattatgactgcc

SEQ ID NO: 17813 - DNA, 80 bp, synthetic construct
  misc_feature 1..80: note = Synthetic: >JN183883_3-cand-540-619
  source 1..80: mol_type = other DNA
tgtaaatcacacacagtctaagaggtcgcgcaggtcaacctcagccacagtaaacacctatactatgcctcaattctatt

SEQ ID NO: 17814 - DNA, 80 bp, synthetic construct
  misc_feature 1..80: note = Synthetic: >JN183883_3-cand-620-699
  source 1..80: mol_type = other DNA
acataacaaagtggaataatgccacctcaactaattgtacatctgtcattacttattcctcttttgctatctgtaataca

SEQ ID NO: 17815 - DNA, 80 bp, synthetic construct
  misc_feature 1..80: note = Synthetic: >JN856008_1-cand-40-119
  source 1..80: mol_type = other DNA
tggttataacaattctagatccatggctgtggaagtacagtgccagcctattatcacttactccaatattggcgtttgtg

SEQ ID NO: 17816 - DNA, 80 bp, synthetic construct
  misc_feature 1..80: note = Synthetic: >JN856008_2-cand-130-209
  source 1..80: mol_type = other DNA
tgacaacgaaactgagcagttttgtatttcaacaaaccaattctccgtttctttgcaggttgagtgtaagagtggtggtt

SEQ ID NO: 17817 - DNA, 80 bp, synthetic construct
  misc_feature 1..80: note = Synthetic: >JN856008_2-cand-230-309
  source 1..80: mol_type = other DNA
ggttgtgataatgctttgtatgcagaagctagtatcacaagtggcacctgtcctttctcttttgataaaattaataatta

SEQ ID NO: 17818 - DNA, 80 bp, synthetic construct
  misc_feature 1..80: note = Synthetic: >JN856008_2-cand-340-419
  source 1..80: mol_type = other DNA
tgttcccactggttctgattgttattttgaagtacttggtaaaactcattttagtagcaatgttgtaggtaacttatatg

SEQ ID NO: 17819 - DNA, 80 bp, synthetic construct
  misc_feature 1..80: note = Synthetic: >JN856008_3-cand-0-79
  source 1..80: mol_type = other DNA
taatacagatacaattttaggtggttacttaccatattgtggtgtaggaagccactgtggttgggttaatatagctggaa

SEQ ID NO: 17820 - DNA, 80 bp, synthetic construct
  misc_feature 1..80: note = Synthetic: >JN856008_3-cand-90-169
  source 1..80: mol_type = other DNA
gtccattgatcgagtaggttatttcgattctttacaattaggaatacctaatgttcatggtgtttattttgatgtacgtg

SEQ ID NO: 17821 - DNA, 80 bp, synthetic construct
  misc_feature 1..80: note = Synthetic: >JN856008_3-cand-190-269
  source 1..80: mol_type = other DNA
gtttgggatcctcaagagaaggttggtttggctattgttatatatggaagttcatactatgaccttttcatgtatttatc

SEQ ID NO: 17822 - DNA, 80 bp, synthetic construct
  misc_feature 1..80: note = Synthetic: >JN856008_3-cand-410-489
  source 1..80: mol_type = other DNA
gacggttttcacttgatgtgaaattgattactagtgatttctatggtttccagtggacacaagattatgtcactatctat

SEQ ID NO: 17823 - DNA, 80 bp, synthetic construct
  misc_feature 1..80: note = Synthetic: >JN856008_3-cand-510-589
  source 1..80: mol_type = other DNA
attttgggttgaaaatagttggaataaagttcaagttaaactctcaaaccattggtcacaagctacctatggttattatg

SEQ ID NO: 17824 - DNA, 80 bp, synthetic construct
  misc_feature 1..80: note = Synthetic: >JQ065044_1-cand-40-119
  source 1..80: mol_type = other DNA
cgtccttggaaggttatacgtaatgagattgcagctcacttggttgaaactgcacctcaaactgactacatatgctttgt

SEQ ID NO: 17825 - DNA, 80 bp, synthetic construct
  misc_feature 1..80: note = Synthetic: >JQ065044_10-cand-0-79
  source 1..80: mol_type = other DNA
gccttagatttacttgatttgtggatacgtaaacctaaacacgttcttgtaaaagcatggactgttattggtaaaccact

SEQ ID NO: 17826 - DNA, 80 bp, synthetic construct
  misc_feature 1..80: note = Synthetic: >JQ065044_10-cand-90-169
  source 1..80: mol_type = other DNA
ggcaaagttattttgctaactactaaacacattaagcgcatctatgattatctgtgtggtgcaggtctcatagatgttac

SEQ ID NO: 17827 - DNA, 80 bp, synthetic construct
  misc_feature 1..80: note = Synthetic: >JQ065044_10-cand-180-259
  source 1..80: mol_type = other DNA
ggtgttaagctggcttacaaagttgcaaagcgctttgtgccatcattatcaacagtacgcagaacttgtattggtttgtt

SEQ ID NO: 17828 - DNA, 80 bp, synthetic construct
  misc_feature 1..80: note = Synthetic: >JQ065044_10-cand-270-349
  source 1..80: mol_type = other DNA
cacactatattaaaaacctgtgcaccttttttacttttaccagctatagctagtatattatcatccggttatcagctgac

SEQ ID NO: 17829 - DNA, 80 bp, synthetic construct
  misc_feature 1..80: note = Synthetic: >JQ065044_10-cand-350-429
  source 1..80: mol_type = other DNA
ttcttatttctatggtaaagcaggtttggcatgtccagccaacctaagtaaccattatgattaccaatctttctgtgctg

SEQ ID NO: 17830 - DNA, 80 bp, synthetic construct
  misc_feature 1..80: note = Synthetic: >JQ065044_10-cand-440-519
  source 1..80: mol_type = other DNA
ttgcttaggttgttttgatggtacagattctttacacttgtatgaccacttgaaaattaatcaagtggttgttaacacta

SEQ ID NO: 17831 - DNA, 80 bp, synthetic construct
  misc_feature 1..80: note = Synthetic: >JQ065044_10-cand-530-609
  source 1..80: mol_type = other DNA
gccttatgctttggctataatattatgttttgttaacatagtacttgttatactcacagctcttgctgtgttctgtgtta

SEQ ID NO: 17832 - DNA, 80 bp, synthetic construct
  misc_feature 1..80: note = Synthetic: >JQ065044_10-cand-620-699
  source 1..80: mol_type = other DNA
actcaaaatacctttgtatggtattgtacaacttgaatatcaaaatacctttatttgtgtctttgctatctattatgtag

SEQ ID NO: 17833 - DNA, 80 bp, synthetic construct
  misc_feature 1..80: note = Synthetic: >JQ065044_10-cand-710-789
  source 1..80: mol_type = other DNA
actattttttagacatcttgcatatggctgtaagaagcctaattgcaatttgtgtgctaaaatgaaaatcgcacctactt

SEQ ID NO: 17834 - DNA, 80 bp, synthetic construct
  misc_feature 1..80: note = Synthetic: >JQ065044_10-cand-790-869
  source 1..80: mol_type = other DNA
tgactgtggatactgtagtgcaaggacgcaagtttccctcagttatacacactaatggtggtgttaaaatttgtcctaat

SEQ ID NO: 17835 - DNA, 80 bp, synthetic construct
  misc_feature 1..80: note = Synthetic: >JQ065044_11-cand-0-79
  source 1..80: mol_type = other DNA
gtgtaggttgtatatttggtgcatccaataaaatagaccagggttttactattagtggcatgacatacccattggcatac

SEQ ID NO: 17836 - DNA, 80 bp, synthetic construct
  misc_feature 1..80: note = Synthetic: >JQ065044_11-cand-80-159
  source 1..80: mol_type = other DNA
tgtgtgccaccattctatcaagtcacaaatgtaacatatgatgccatgcgtctactttttgcatttgctgacttaaattc

SEQ ID NO: 17837 - DNA, 80 bp, synthetic construct
  misc_feature 1..80: note = Synthetic: >JQ065044_11-cand-170-249
  source 1..80: mol_type = other DNA
tttcttcgcattaacactaaaaccatgggcatgctgaatgtttcatgttcagcttcccccacaccattaggccatcaaga

SEQ ID NO: 17838 - DNA, 80 bp, synthetic construct
  misc_feature 1..80: note = Synthetic: >JQ065044_11-cand-250-329
  source 1..80: mol_type = other DNA
tgctgatcgcactttctatggctacaataaacaattatactgttacctagacacccctgctggtatgcagtatatgggtc

SEQ ID NO: 17839 - DNA, 80 bp, synthetic construct
  misc_feature 1..80: note = Synthetic: >JQ065044_11-cand-330-409
  source 1..80: mol_type = other DNA
cactgccagccaatttaacagagataactctgtttaggactggacaaatttataccaatggctttcaccttggtaccata

SEQ ID NO: 17840 - DNA, 80 bp, synthetic construct
  misc_feature 1..80: note = Synthetic: >JQ065044_11-cand-410-489
  source 1..80: mol_type = other DNA
ccttcagagctaacatatgtctacctagacaagttagctttccaaaataaaactgtgtgtatgatggctaatctcaccga

SEQ ID NO: 17841 - DNA, 80 bp, synthetic construct
  misc_feature 1..80: note = Synthetic: >JQ065044_11-cand-490-569
  source 1..80: mol_type = other DNA
cacactcattactttaaatcatactgttattcaacaggttacctattgtgagaaggatgcagtgcaggctttagcttgcc

SEQ ID NO: 17842 - DNA, 80 bp, synthetic construct
  misc_feature 1..80: note = Synthetic: >JQ065044_11-cand-570-649
  source 1..80: mol_type = other DNA
agcaatctactcatcaattgcaggatggtttttattctgacccagcacctgctgttaacaacctaccaaaaacacttgta

SEQ ID NO: 17843 - DNA, 80 bp, synthetic construct
  misc_feature 1..80: note = Synthetic: >JQ065044_11-cand-650-729
  source 1..80: mol_type = other DNA
acactaccaaagatagcagaatcctctacattacaaattaatgtctctgctacatatagctatggtagtgcctcaggttc

SEQ ID NO: 17844 - DNA, 80 bp, synthetic construct
  misc_feature 1..80: note = Synthetic: >JQ065044_11-cand-720-799
  source 1..80: mol_type = other DNA
cctcaggttccattaaactatcctataatggatccagtaataactctcattgtgttcaaacaccctacttcaagcttgaa

SEQ ID NO: 17845 - DNA, 80 bp, synthetic construct
  misc_feature 1..80: note = Synthetic: >JQ065044_11-cand-800-879
  source 1..80: mol_type = other DNA
caaaatctagtttgtagtggtggctgttctgtacgcattgaaactctcacatgcccttttgatcttaatgcagtctctaa

SEQ ID NO: 17846 - DNA, 80 bp, synthetic construct
  misc_feature 1..80: note = Synthetic: >JQ065044_11-cand-880-959
  source 1..80: mol_type = other DNA
tggcatgtcatttcaacaattctgtgttagcactgtatctggccaatgcagcatgcaagccattgttaacacaggtcaac

SEQ ID NO: 17847 - DNA, 80 bp, synthetic construct
  misc_feature 1..80: note = Synthetic: >JQ065044_11-cand-970-1049
  source 1..80: mol_type = other DNA
tgtaacctccacactttatgtaacttatgttgaagggcaatccttcacaggaacctccagtgatcaaattgaggatctca

SEQ ID NO: 17848 - DNA, 80 bp, synthetic construct
  misc_feature 1..80: note = Synthetic: >JQ065044_11-cand-1050-1129
  source 1..80: mol_type = other DNA
ctgttttacatctagaccagtgcacttcttacaccatttatggagtatctggcactggtgttataaccttatctgactta

SEQ ID NO: 17849 - DNA, 80 bp, synthetic construct
  misc_feature 1..80: note = Synthetic: >JQ065044_11-cand-1140-1219
  source 1..80: mol_type = other DNA
acggcatcacatttcgagctgccaatggagagttgtctgcttttaagaatactactactggtgatgtttacactatacaa

SEQ ID NO: 17850 - DNA, 80 bp, synthetic construct
  misc_feature 1..80: note = Synthetic: >JQ065044_11-cand-1220-1299
  source 1..80: mol_type = other DNA
ccgtgttcattgccagcacaattagcaattattgactccaccattgtaggagctattacatctactaatgagtcctatgg

SEQ ID NO: 17851 - DNA, 80 bp, synthetic construct
  misc_feature 1..80: note = Synthetic: >JQ065044_11-cand-1310-1389
  source 1..80: mol_type = other DNA
accattgtgactcccacattctattattcaaccaatgcgaccagcaactgtactgcacctaaaatctcttatggagaatt

SEQ ID NO: 17852 - DNA, 80 bp, synthetic construct
  misc_feature 1..80: note = Synthetic: >JQ065044_12-cand-0-79
  source 1..80: mol_type = other DNA
ggacctctttaagcccttaacaacactagtcaacacactcattgacaagattaaagacttgtcacttgatgtagctgcta

SEQ ID NO: 17853 - DNA, 80 bp, synthetic construct
  misc_feature 1..80: note = Synthetic: >JQ065044_12-cand-80-159
  source 1..80: mol_type = other DNA
gaattacaaatgtgcagattgtctattctgctggacgtcttgttgtggaaacgacgtctgtactatctactttgttgcag

SEQ ID NO: 17854 - DNA, 80 bp, synthetic construct
  misc_feature 1..80: note = Synthetic: >JQ065044_12-cand-160-239
  source 1..80: mol_type = other DNA
cctttgtgtgatttcatcacaccatttcttaagaaaatggcaggttttgcaacttatgctgttggaaggtccatggtctt

SEQ ID NO: 17855 - DNA, 80 bp, synthetic construct
  misc_feature 1..80: note = Synthetic: >JQ065044_12-cand-250-329
  source 1..80: mol_type = other DNA
atgggctcttttattcttcagcaaacaaaagtacgtgtagttaataaggttaggtatgtcttcgacgtgtctgccgacta

SEQ ID NO: 17856 - DNA, 80 bp, synthetic construct
  misc_feature 1..80: note = Synthetic: >JQ065044_12-cand-330-409
  source 1..80: mol_type = other DNA
ccgtatagacaatgtaacaacaaaagttaatttgcatgatagtcttcatgttactagtgacacaccatctggccctctgg

SEQ ID NO: 17857 - DNA, 80 bp, synthetic construct
  misc_feature 1..80: note = Synthetic: >JQ065044_12-cand-420-499
  source 1..80: mol_type = other DNA
cgttgtcattggtgacactgtcctgcagatggctactgatggtaaagcatactatcctagtgatggagaatatgcttctt

SEQ ID NO: 17858 - DNA, 80 bp, synthetic construct
  misc_feature 1..80: note = Synthetic: >JQ065044_12-cand-500-579
  source 1..80: mol_type = other DNA
tacctgcgtttaaagctggatccgatgagttgtctatcaccttcacttgtgatgtgtttgatgatgaccttaattcagct

SEQ ID NO: 17859 - DNA, 80 bp, synthetic construct
  misc_feature 1..80: note = Synthetic: >JQ065044_12-cand-580-659
  source 1..80: mol_type = other DNA
ataaatgatacacttgttagctacgaattgaatcaactcgtagcaccacgtgattcaacacccaggcagatagcagcatt

SEQ ID NO: 17860 - DNA, 80 bp, synthetic construct
  misc_feature 1..80: note = Synthetic: >JQ065044_12-cand-660-739
  source 1..80: mol_type = other DNA
agttgttaatacactagtggatgccatcactgattactttcctgaaaagtctttggatatgcctgaagattatcaagtct

SEQ ID NO: 17861 - DNA, 80 bp, synthetic construct
  misc_feature 1..80: note = Synthetic: >JQ065044_12-cand-740-819
  source 1..80: mol_type = other DNA
tctctacttttgacgacttgccattaacaaatgaacacattccagatcatctcaccttatacattcaagcaatggagggt

SEQ ID NO: 17862 - DNA, 80 bp, synthetic construct
  misc_feature 1..80: note = Synthetic: >JQ065044_12-cand-820-899
  source 1..80: mol_type = other DNA
gatgatgaggatgatgatgtcattattgaagatgatgaccaggaggtcattcttgacacggatgaggatgagggtgttat

SEQ ID NO: 17863 - DNA, 80 bp, synthetic construct
  misc_feature 1..80: note = Synthetic: >JQ065044_12-cand-900-979
  source 1..80: mol_type = other DNA
accccaatgttgggacatcccaaacattgataaagtccttaacaaatttaagactcagcaggatttgaccattgatgtta

SEQ ID NO: 17864 - DNA, 80 bp, synthetic construct
  misc_feature 1..80: note = Synthetic: >JQ065044_12-cand-980-1059
  source 1..80: mol_type = other DNA
aacctactgaagaattgccaagtgttgaacaacctaaaattgttcaagatgtcgatcaatctgaggttctattgaaagag

SEQ ID NO: 17865 - DNA, 80 bp, synthetic construct
  misc_feature 1..80: note = Synthetic: >JQ065044_12-cand-1060-1139
  source 1..80: mol_type = other DNA
ccacaaattgcgcaaactcaagatgcagaaccccctgtaccaattgttccagaacttactggttcaaaacctaagtctct

SEQ ID NO: 17866 - DNA, 80 bp, synthetic construct
  misc_feature 1..80: note = Synthetic: >JQ065044_12-cand-1140-1219
  source 1..80: mol_type = other DNA
taaacaatactttagtgccaataagttagacactattagtgaagagacatgtgatacaatagtaacccctgaggctacta

SEQ ID NO: 17867 - DNA, 80 bp, synthetic construct
  misc_feature 1..80: note = Synthetic: >JQ065044_12-cand-1220-1299
  source 1..80: mol_type = other DNA
tacaagtggaagagtcagacatacaaattgcagatgatgcaagtgctgttgatgactctcttgaaaatcacgaatcagac

SEQ ID NO: 17868 - DNA, 80 bp, synthetic construct
  misc_feature 1..80: note = Synthetic: >JQ065044_12-cand-1300-1379
  source 1..80: mol_type = other DNA
acatgcattgtggatgatgacactttgtcagattctgcaattccagttgttgacgattctgacactatcatcacagatag

SEQ ID NO: 17869 - DNA, 80 bp, synthetic construct
  misc_feature 1..80: note = Synthetic: >JQ065044_12-cand-1380-1459
  source 1..80: mol_type = other DNA
cacagaaggtgatgatactgaacaattgttggacactgttgttaatcaaccacttactattgacaacaacatcccaacac

SEQ ID NO: 17870 - DNA, 80 bp, synthetic construct
  misc_feature 1..80: note = Synthetic: >JQ065044_12-cand-1460-1539
  source 1..80: mol_type = other DNA
atgctattaaacaaccaagccctactatggtagagctggttgttggtgatttgtcaactataaagtttgacaattcagtc

SEQ ID NO: 17871 - DNA, 80 bp, synthetic construct
  misc_feature 1..80: note = Synthetic: >JQ065044_12-cand-1540-1619
  source 1..80: mol_type = other DNA
ctagttaacccagctaatgcgcagctcactaatggtggtggtgctgcaaaagcaattgctgagttggcgggacccgatta

SEQ ID NO: 17872 - DNA, 80 bp, synthetic construct
  misc_feature 1..80: note = Synthetic: >JQ065044_2-cand-40-119
  source 1..80: mol_type = other DNA
actaactacttgcagtgttgactttgtaaatgttacggccaacaatgtttccattattataccagactatgttgatgtta

SEQ ID NO: 17873 - DNA, 80 bp, synthetic construct
  misc_feature 1..80: note = Synthetic: >JQ065044_3-cand-20-99
  source 1..80: mol_type = other DNA
ctatctttatagcaataattaatattgttggcattgttctagtgtacaactgtatttctattgcatttgtgtattatgct

SEQ ID NO: 17874 - DNA, 80 bp, synthetic construct
  misc_feature 1..80: note = Synthetic: >JQ065044_4-cand-0-79
  source 1..80: mol_type = other DNA
acttaaaagtcattcttaatgacaaagatagctatttacagtatgtagatggtaacacacttattcataaaggtgtccgc

SEQ ID NO: 17875 - DNA, 80 bp, synthetic construct
  misc_feature 1..80: note = Synthetic: >JQ065044_4-cand-90-169
  source 1..80: mol_type = other DNA
ttaaaaagctttctttggataattcacctgttgatggtatacctgaagagtaccctgttgttgttgaaacagtaagggaa

SEQ ID NO: 17876 - DNA, 80 bp, synthetic construct
  misc_feature 1..80: note = Synthetic: >JQ065044_5-cand-0-79
  source 1..80: mol_type = other DNA
ttcagttaatattggatgagattgtagcaacaggaacaactaagtcaccttatgcgtacctactttccagtgacccagac

SEQ ID NO: 17877 - DNA, 80 bp, synthetic construct
  misc_feature 1..80: note = Synthetic: >JQ065044_5-cand-130-209
  source 1..80: mol_type = other DNA
tcactgcataactgtttttcagcgacgcacaccagaaggtttcaactggggtggtgatttaacaacattcaacgtctaca

SEQ ID NO: 17878 - DNA, 80 bp, synthetic construct
  misc_feature 1..80: note = Synthetic: >JQ065044_5-cand-190-269
  source 1..80: mol_type = other DNA
aacaacattcaacgtctacacggtacctttacctaaagatgcttgaatggactgtttattacctttcctggttgatttta

SEQ ID NO: 17879 - DNA, 80 bp, synthetic construct
  misc_feature 1..80: note = Synthetic: >JQ065044_6-cand-130-209
  source 1..80: mol_type = other DNA
gacttatgaatgggtatttggcatcactatgtctgaaagactatcagtttacactgtaggactatacatttgtgtctatt

SEQ ID NO: 17880 - DNA, 80 bp, synthetic construct
  misc_feature 1..80: note = Synthetic: >JQ065044_6-cand-230-309
  source 1..80: mol_type = other DNA
actcttaggtgcatgcgctatagatcaacttcttttattaacctttgtatgcaatgtttccagtttggttacatggttca

SEQ ID NO: 17881 - DNA, 80 bp, synthetic construct
  misc_feature 1..80: note = Synthetic: >JQ065044_6-cand-330-409
  source 1..80: mol_type = other DNA
cacagaaatggacagaacaattactatttaccgcaatctccttactaacttcccatccagttatggcagctagtagttgg

SEQ ID NO: 17882 - DNA, 80 bp, synthetic construct
  misc_feature 1..80: note = Synthetic: >JQ065044_7-cand-110-189
  source 1..80: mol_type = other DNA
tactgttcattaatacttgtttagcctgtgttaaactctcatataaatgtttcctaggtgcacgttatctagtaaacccc

SEQ ID NO: 17883 - DNA, 80 bp, synthetic construct
  misc_feature 1..80: note = Synthetic: >JQ065044_7-cand-210-289
  source 1..80: mol_type = other DNA
accaaaaacagtctctgatactgagtttgtaaaaatacaccaatttccaagaaataactatgtctgacgctcaagagtgg

SEQ ID NO: 17884 - DNA, 80 bp, synthetic construct
  misc_feature 1..80: note = Synthetic: >JQ065044_7-cand-310-389
  source 1..80: mol_type = other DNA
tattatatgggctcttggagtcatactccaaggtggctacgccactcgaacccgtataatatatattattaaactaattc

SEQ ID NO: 17885 - DNA, 80 bp, synthetic construct
  misc_feature 1..80: note = Synthetic: >JQ065044_7-cand-400-479
  source 1..80: mol_type = other DNA
tttgcagccatttacactagtagttaccatatgggctgcagtggacaatggttcaaataaaacaggagctgtttttatca

SEQ ID NO: 17886 - DNA, 80 bp, synthetic construct
  misc_feature 1..80: note = Synthetic: >JQ065044_8-cand-140-219
  source 1..80: mol_type = other DNA
catcacgtaatggcgttacctgttcagtaactccatctactattacacttcgtggcaatattgctactcagcctttacaa

SEQ ID NO: 17887 - DNA, 80 bp, synthetic construct
  misc_feature 1..80: note = Synthetic: >JQ065044_8-cand-240-319
  source 1..80: mol_type = other DNA
tattaccattaaacctctacttaaatgggtgttgttgtttggtgctgtctatggtgctgcattgctcttgagttatgcag

SEQ ID NO: 17888 - DNA, 80 bp, synthetic construct
  misc_feature 1..80: note = Synthetic: >JQ065044_8-cand-330-409
  source 1..80: mol_type = other DNA
tagcaacccaacaataccacgtgttaaatcagacattcctaccactggcttctatgtcattaggaatggagttttagaca

SEQ ID NO: 17889 - DNA, 80 bp, synthetic construct
  misc_feature 1..80: note = Synthetic: >JQ065044_8-cand-430-509
  source 1..80: mol_type = other DNA
tgtttctccaacaagtttgtctcttttgatgtttatatacaagctgattatgttaattcacaccactgtccagtggtggt

SEQ ID NO: 17890 - DNA, 80 bp, synthetic construct
  misc_feature 1..80: note = Synthetic: >JQ065044_8-cand-510-589
  source 1..80: mol_type = other DNA
tggcatagcagatgttcaaacattgtcagtgccaggcatacctgctggtataataacacgggatggtggtatattgcatg

SEQ ID NO: 17891 - DNA, 80 bp, synthetic construct
  misc_feature 1..80: note = Synthetic: >JQ065044_9-cand-0-79
  source 1..80: mol_type = other DNA
gttctagaccctgtgacatcactcacggcttttgagcagttctttggtgctcaaccgatcttacgcgctgtccgcaatct

SEQ ID NO: 17892 - DNA, 80 bp, synthetic construct
  misc_feature 1..80: note = Synthetic: >JQ065044_9-cand-210-289
  source 1..80: mol_type = other DNA
gcttcgctggcactctatcataagattgtgaagattgacagcgttgaattgaaaactattgctgatcaggttgctattga

SEQ ID NO: 17893 - DNA, 80 bp, synthetic construct
  misc_feature 1..80: note = Synthetic: >JQ065044_9-cand-300-379
  source 1..80: mol_type = other DNA
accaataaaatcggtgtggctttggctgatgccaaggctataaccctgacacataaggatggctacctaacactcaacaa

SEQ ID NO: 17894 - DNA, 80 bp, synthetic construct
  misc_feature 1..80: note = Synthetic: >JQ065044_9-cand-390-469
  source 1..80: mol_type = other DNA
ggccctgtctttactaacaccctgttagctcaggctacacccagcaatggtgctatgacctattcggactttcacctctt

SEQ ID NO: 17895 - DNA, 80 bp, synthetic construct
  misc_feature 1..80: note = Synthetic: >JQ065044_9-cand-480-559
  source 1..80: mol_type = other DNA
tctttagccattgtggatggtgttagtgtgccaattgtatctaaacctattgtggcttctcaacttggagtcataccaga

SEQ ID NO: 17896 - DNA, 80 bp, synthetic construct
  misc_feature 1..80: note = Synthetic: >JQ065044_9-cand-570-649
  source 1..80: mol_type = other DNA
acacttgtgcctgactatgaccagctcattccaccacaagttgctggaagtgctgtaaaagtagcaggacttacttacat

SEQ ID NO: 17897 - DNA, 80 bp, synthetic construct
  misc_feature 1..80: note = Synthetic: >JQ065044_9-cand-660-739
  source 1..80: mol_type = other DNA
gattctccaccactttactatccaaaagtgaagggtggtgttctcgccgtagctctcaaacctacaggcactagagacaa

SEQ ID NO: 17898 - DNA, 80 bp, synthetic construct
  misc_feature 1..80: note = Synthetic: >JQ065045_1-cand-40-119
  source 1..80: mol_type = other DNA
caaatcttggctacatcattcaataatgctatgggcaatattacccaggcattccatgatgtcaaccaaggactttcaca

SEQ ID NO: 17899 - DNA, 80 bp, synthetic construct
  misc_feature 1..80: note = Synthetic: >JQ065045_2-cand-40-119
  source 1..80: mol_type = other DNA
gtctaattacactgaggtacatttaaacactaccaatggttatatacatcagattaaatactgctatgacccacttgaca

SEQ ID NO: 17900 - DNA, 80 bp, synthetic construct
  misc_feature 1..80: note = Synthetic: >JQ065045_3-cand-40-119
  source 1..80: mol_type = other DNA
tgattatgtcgacgtcaataaaacaattgaggagtttctcaacaacttacctaactatacactgccagatctttcgatcg

SEQ ID NO: 17901 - DNA, 80 bp, synthetic construct
  misc_feature 1..80: note = Synthetic: >JQ065045_4-cand-0-79
  source 1..80: mol_type = other DNA
gaacggtgtatgtacgtccaagagggcggtttcataccagacaactttacattccctcagtggtttgtactcaccaacga

SEQ ID NO: 17902 - DNA, 80 bp, synthetic construct
  misc_feature 1..80: note = Synthetic: >JQ065045_4-cand-110-189
  source 1..80: mol_type = other DNA
gtcgcagccgctaattgtcaatgggcacctttgctcatggcaatctaaccaacaatatcgaaaatattcctttaacacct

SEQ ID NO: 17903 - DNA, 80 bp, synthetic construct
  misc_feature 1..80: note = Synthetic: >JQ065045_5-cand-0-79
  source 1..80: mol_type = other DNA
acgtttggttccatatgtttttccactgttaacaatggtggctgcactatacatgttcaaaaagtgttgcgacactatcg

SEQ ID NO: 17904 - DNA, 80 bp, synthetic construct
  misc_feature 1..80: note = Synthetic: >JQ065045_5-cand-100-179
  source 1..80: mol_type = other DNA
atgtttcctatcaaccaggaaaccaaataacagctatgccaaaagcctcttcaggcactactgacatatccactgtttat

SEQ ID NO: 17905 - DNA, 80 bp, synthetic construct
  misc_feature 1..80: note = Synthetic: >JQ065045_5-cand-200-279
  source 1..80: mol_type = other DNA
taatatctatggtaaaactggtacaggcgtcattactaaaacaaatgaaacccacattggaggactttactactcctccc

SEQ ID NO: 17906 - DNA, 80 bp, synthetic construct
  misc_feature 1..80: note = Synthetic: >JQ065045_5-cand-300-379
  source 1..80: mol_type = other DNA
tttaaaaactcaactacacaaacaatttacagcatcacaccctgtgaattgtctgcacaagttgctgtatataatgattc

SEQ ID NO: 17907 - DNA, 80 bp, synthetic construct
  misc_feature 1..80: note = Synthetic: >JQ065045_5-cand-400-479
  source 1..80: mol_type = other DNA
caacagagaatttcaccttctctgatttctcttataagctgaaaactcccatgttctattaccactcaattggtaatacg

SEQ ID NO: 17908 - DNA, 80 bp, synthetic construct
  misc_feature 1..80: note = Synthetic: >JQ065045_5-cand-500-579
  source 1..80: mol_type = other DNA
tacatttggttctattggtgtctgcccagatggtggcctaattattcaaagtgccaccaccaatgatgtagacgctgtag

SEQ ID NO: 17909 - DNA, 80 bp, synthetic construct
  misc_feature 1..80: note = Synthetic: >JQ065045_5-cand-710-789
  source 1..80: mol_type = other DNA
ttgcctgcaactactactacaatatactagtgcgtgttcaacaattgagcaggctctagctttaaatgcgcgacttgaag

SEQ ID NO: 17910 - DNA, 80 bp, synthetic construct
  misc_feature 1..80: note = Synthetic: >JQ065046_1-cand-0-79
  source 1..80: mol_type = other DNA
caactgtggctgagctctacaagctctttcgcactgagtcttgggcaagattagagcgcaaatttgctggccttaaggtc

SEQ ID NO: 17911 - DNA, 80 bp, synthetic construct
  misc_feature 1..80: note = Synthetic: >JQ065046_1-cand-150-229
  source 1..80: mol_type = other DNA
ataatattgttggcaccatcatccacaagctccagagcctgtcccttgatgttgctgcccgcattaccggcgttcgattg

SEQ ID NO: 17912 - DNA, 80 bp, synthetic construct
  misc_feature 1..80: note = Synthetic: >JQ065046_10-cand-0-79
  source 1..80: mol_type = other DNA
cttacccggattcaaggcaggcgcggatcagctcactgttagcttttcctgcgacctctttgacgatcctacaaatgatg

SEQ ID NO: 17913 - DNA, 80 bp, synthetic construct
  misc_feature 1..80: note = Synthetic: >JQ065046_10-cand-70-149
  source 1..80: mol_type = other DNA
acaaatgatgccataaacgagctcctagccggttatgagcttaacactcttgtggcgcctagtgactcatccccgcgaca

SEQ ID NO: 17914 - DNA, 80 bp, synthetic construct
  misc_feature 1..80: note = Synthetic: >JQ065046_10-cand-150-229
  source 1..80: mol_type = other DNA
gcttgcaaaactcgtcgtggatgcgttggtagatgctctcacagactactatcctgagaaggtcatggatttacctgggg

SEQ ID NO: 17915 - DNA, 80 bp, synthetic construct
  misc_feature 1..80: note = Synthetic: >JQ065046_10-cand-230-309
  source 1..80: mol_type = other DNA
attaccaggtattctccacctttgatgatcttccacttgcaacccatcacattcctcaatacctcgcgctctatgtacaa

SEQ ID NO: 17916 - DNA, 80 bp, synthetic construct
  misc_feature 1..80: note = Synthetic: >JQ065046_10-cand-310-389
  source 1..80: mol_type = other DNA
gccatggagagcgatgaggatggtgacgaagatgtttacgtagaggaggacgactacgtgcctgaatccactacggaccc

SEQ ID NO: 17917 - DNA, 80 bp, synthetic construct
  misc_feature 1..80: note = Synthetic: >JQ065046_10-cand-390-469
  source 1..80: mol_type = other DNA
tgatgatgaggaaggtgccattcctcagcaatgggatcttccagatgttgacaaatttttagccaaaatgcgcacggacc

SEQ ID NO: 17918 - DNA, 80 bp, synthetic construct
  misc_feature 1..80: note = Synthetic: >JQ065046_10-cand-470-549
  source 1..80: mol_type = other DNA
cggctggtgaacctgcgcaggctaacactgatgatgactctttgagtgttacccaaaccagggtctcagaaccagaacct

SEQ ID NO: 17919 - DNA, 80 bp, synthetic construct
  misc_feature 1..80: note = Synthetic: >JQ065046_10-cand-550-629
  source 1..80: mol_type = other DNA
aaggaaccggagcttgccgcctatgatcctgaggattcgaactctgacgaagaaattttcatacctatagtgcctgcgct

SEQ ID NO: 17920 - DNA, 80 bp, synthetic construct
  misc_feature 1..80: note = Synthetic: >JQ065046_10-cand-630-709
  source 1..80: mol_type = other DNA
gccggctgattatatgccggtagtctacactattaaggagtataaacagaaagacaagcttcctactattcaggaaactt

SEQ ID NO: 17921 - DNA, 80 bp, synthetic construct
  misc_feature 1..80: note = Synthetic: >JQ065046_10-cand-710-789
  source 1..80: mol_type = other DNA
tatctagtcaggagtctattcagcctgagctaatggcgcctcttgagacgcaatccaccgacgcagtgaccgacactcca

SEQ ID NO: 17922 - DNA, 80 bp, synthetic construct
  misc_feature 1..80: note = Synthetic: >JQ065046_10-cand-790-869
  source 1..80: mol_type = other DNA
cccattcaggaggtccttcctgtgcctcaagctgcatcttcaaccccctctccggcagcaactatagagggggctgatga

SEQ ID NO: 17923 - DNA, 80 bp, synthetic construct
  misc_feature 1..80: note = Synthetic: >JQ065046_10-cand-870-949
  source 1..80: mol_type = other DNA
taaaccgcaggttcctcaaattgaggagcttgtacagtcaattgatcaacctacttttgaagaggttgagactattgtca

SEQ ID NO: 17924 - DNA, 80 bp, synthetic construct
  misc_feature 1..80: note = Synthetic: >JQ065046_10-cand-950-1029
  source 1..80: mol_type = other DNA
ctgatagcagtggtggcgaagttgacgaggagcctcttgctaccatcgtcaacacgcctactactgttgataacaactta

SEQ ID NO: 17925 - DNA, 80 bp, synthetic construct
  misc_feature 1..80: note = Synthetic: >JQ065046_10-cand-1040-1119
  source 1..80: mol_type = other DNA
ccattaaagccccaagcccgactcaggttgagcttgtggttggcgagctgactagtattaagtatgacaattctgtctta

SEQ ID NO: 17926 - DNA, 80 bp, synthetic construct
  misc_feature 1..80: note = Synthetic: >JQ065046_10-cand-1120-1199
  source 1..80: mol_type = other DNA
gtcaatccagccaattcggctctgtccaatggcggcggtgctgctagggcaattgccgcgatggctggtcctaactatca

SEQ ID NO: 17927 - DNA, 80 bp, synthetic construct
  misc_feature 1..80: note = Synthetic: >JQ065046_10-cand-1210-1289
  source 1..80: mol_type = other DNA
aatagcattgcgcctattgctggaaacgtgactacaggaccatttgatgctgcaaagtatggtgtagcgtgtattttgca

SEQ ID NO: 17928 - DNA, 80 bp, synthetic construct
  misc_feature 1..80: note = Synthetic: >JQ065046_10-cand-1300-1379
  source 1..80: mol_type = other DNA
cctcgcggcactgacccgaatgtgcaggacttgttatatcaggcatacaagagtatcctgactgagcctgctcattatgt

SEQ ID NO: 17929 - DNA, 80 bp, synthetic construct
  misc_feature 1..80: note = Synthetic: >JQ065046_10-cand-1380-1459
  source 1..80: mol_type = other DNA
aatacctatcttgggcgccgggattttcgggtgcaatcctgtgcactccctggacgcctttaagaaggcttgtcctaatg

SEQ ID NO: 17930 - DNA, 80 bp, synthetic construct
  misc_feature 1..80: note = Synthetic: >JQ065046_10-cand-1460-1539
  source 1..80: mol_type = other DNA
acatagggcgcgtaacccttgtcaccttggacaaaaaccacctacaaatttgggatgcgctcaaccggacggttgttcgc

SEQ ID NO: 17931 - DNA, 80 bp, synthetic construct
  misc_feature 1..80: note = Synthetic: >JQ065046_10-cand-1540-1619
  source 1..80: mol_type = other DNA
accaccacagattatgatcagattaccacgaaagcgctaacacctcaaggtatacttgatgctaacctcttcgatggtac

SEQ ID NO: 17932 - DNA, 80 bp, synthetic construct
  misc_feature 1..80: note = Synthetic: >JQ065046_10-cand-1620-1699
  source 1..80: mol_type = other DNA
tgaatttgtccaggaccccaagccaggccaggtctacttggaggtcactgatgaagttcaacagcaggctaaggaattag

SEQ ID NO: 17933 - DNA, 80 bp, synthetic construct
  misc_feature 1..80: note = Synthetic: >JQ065046_10-cand-1700-1779
  source 1..80: mol_type = other DNA
accttactctgcaacaatatgctgcatatctcaagctctgccacgccagatggtccgtaaggcgcactaatgggattatg

SEQ ID NO: 17934 - DNA, 80 bp, synthetic construct
  misc_feature 1..80: note = Synthetic: >JQ065046_10-cand-1780-1859
  source 1..80: mol_type = other DNA
catcttaaacaacatatgaataactgctttgtgagtgctggaattaatttattccagaacactcgctttcagttacgtcc

SEQ ID NO: 17935 - DNA, 80 bp, synthetic construct
  misc_feature 1..80: note = Synthetic: >JQ065046_10-cand-1860-1939
  source 1..80: mol_type = other DNA
tgctattgaccaactctacaaagagtacctcaatggtaaccccagccgcctcgttgcgtggatttatgcctccaccaacc

SEQ ID NO: 17936 - DNA, 80 bp, synthetic construct
  misc_feature 1..80: note = Synthetic: >JQ065046_10-cand-1940-2019
  source 1..80: mol_type = other DNA
atcagattggtgattttggctgcccgcaggaggttacatccttgttcgttaacaacgcgaactctacattctcagctacc

SEQ ID NO: 17937 - DNA, 80 bp, synthetic construct
  misc_feature 1..80: note = Synthetic: >JQ065046_2-cand-0-79
  source 1..80: mol_type = other DNA
ttgcatcattggctctctttgaccggctggttaagattgagcacgatgatctcctccaagtcgcccgcgatgttgctatc

SEQ ID NO: 17938 - DNA, 80 bp, synthetic construct
  misc_feature 1..80: note = Synthetic: >JQ065046_2-cand-270-349
  source 1..80: mol_type = other DNA
cgacggctgttgagcaaggcggtagacttctccccgtggcttgcaagactgttccagtcttcatcaagggtaaacccctc

SEQ ID NO: 17939 - DNA, 80 bp, synthetic construct
  misc_feature 1..80: note = Synthetic: >JQ065046_3-cand-0-79
  source 1..80: mol_type = other DNA
cgtttactctcgtcgtcaccatctggacagctgttgacgccagagctacacctagcagcgccgtctttatcattgccata

SEQ ID NO: 17940 - DNA, 80 bp, synthetic construct
  misc_feature 1..80: note = Synthetic: >JQ065046_3-cand-100-179
  source 1..80: mol_type = other DNA
cctatcatggctgcgctacgtgtatgattcaatccgcctagttatgaagacgcactcagcctggagcttctcccctgaga

SEQ ID NO: 17941 - DNA, 80 bp, synthetic construct
  misc_feature 1..80: note = Synthetic: >JQ065046_3-cand-320-399
  source 1..80: mol_type = other DNA
gtaacctcgcctccaaagtctatggtagttgtcactccctctgacacatttcactatagccttaggaagaccattgaatc

SEQ ID NO: 17942 - DNA, 80 bp, synthetic construct
  misc_feature 1..80: note = Synthetic: >JQ065046_3-cand-420-499
  source 1..80: mol_type = other DNA
ctgtcttgatctatcagggagaccgctcctcaaatgcagctttacacacaatcacaacctctaattctggcaacgccagg

SEQ ID NO: 17943 - DNA, 80 bp, synthetic construct
  misc_feature 1..80: note = Synthetic: >JQ065046_4-cand-0-79
  source 1..80: mol_type = other DNA
atgaacaaggccatgcccttgcaacactaacgcagcaactggccaataactttcaggctatctccgcctctatatccgac

SEQ ID NO: 17944 - DNA, 80 bp, synthetic construct
  misc_feature 1..80: note = Synthetic: >JQ065046_4-cand-100-179
  source 1..80: mol_type = other DNA
acttgaggcagatgctcaggttgatagacttattacgggacgtctagcatcactaaatgcattcgtcacacagacactat

SEQ ID NO: 17945 - DNA, 80 bp, synthetic construct
  misc_feature 1..80: note = Synthetic: >JQ065046_4-cand-200-279
  source 1..80: mol_type = other DNA
cagcagcggcagctagccactgataaagttaatgagtgcgttaaatcacagtccccccgctatggattctgtggtaacgg

SEQ ID NO: 17946 - DNA, 80 bp, synthetic construct
  misc_feature 1..80: note = Synthetic: >JQ065046_4-cand-300-379
  source 1..80: mol_type = other DNA
tcaatgcagcgccacaagggttgttattcttccacactgtgttgttaccaacccaatatgcttatgtgcaggccttctcg

SEQ ID NO: 17947 - DNA, 80 bp, synthetic construct
  misc_feature 1..80: note = Synthetic: >JQ065046_4-cand-400-479
  source 1..80: mol_type = other DNA
agcgcttgcccttaacgaccccacactagcactatttaagaatggagacaagtacctcgtgtccccgcgtaatatgtatc

SEQ ID NO: 17948 - DNA, 80 bp, synthetic construct
  misc_feature 1..80: note = Synthetic: >JQ065046_5-cand-0-79
  source 1..80: mol_type = other DNA
aaatggtctataaccaggctcctattgctctccaatcaggtgtagttaagaagacgtgtacgtggttattccactgcatg

SEQ ID NO: 17949 - DNA, 80 bp, synthetic construct
  misc_feature 1..80: note = Synthetic: >JQ065046_5-cand-100-179
  source 1..80: mol_type = other DNA
cttagctactcttcatgtcttcccaacaactctctacccagtcgtgctgcctatggccgctgccatcgcagtattcctgg

SEQ ID NO: 17950 - DNA, 80 bp, synthetic construct
  misc_feature 1..80: note = Synthetic: >JQ065046_5-cand-320-399
  source 1..80: mol_type = other DNA
atctctcagcagctctatggctatagtgttgccttctacttgtgtgtgtacatagctttggcaatcaactatacgttgcg

SEQ ID NO: 17951 - DNA, 80 bp, synthetic construct
  misc_feature 1..80: note = Synthetic: >JQ065046_5-cand-420-499
  source 1..80: mol_type = other DNA
catctatctcaacctttgctatacagtgcatgcagtttggctatttggcccatgtgatgtatcgcttatgtactacaact

SEQ ID NO: 17952 - DNA, 80 bp, synthetic construct
  misc_feature 1..80: note = Synthetic: >JQ065046_5-cand-520-599
  source 1..80: mol_type = other DNA
cacagcagtctccatgctcacctcccaccctatgttggctggtgtctgctggtggcttgctgggcgtgtgcctctaccat

SEQ ID NO: 17953 - DNA, 80 bp, synthetic construct
  misc_feature 1..80: note = Synthetic: >JQ065046_5-cand-620-699
  source 1..80: mol_type = other DNA
gtccgcgtacttctgtacgtggttggtggctatgttatctgtatgcggtttggccttatgtggatcataaaccgctttac

SEQ ID NO: 17954 - DNA, 80 bp, synthetic construct
  misc_feature 1..80: note = Synthetic: >JQ065046_6-cand-0-79
  source 1..80: mol_type = other DNA
gcatcctcttgcaggatccgcccgctgctgcaacgccacaggttccagtgcagtccaaagttgaagtctttgagaatcct

SEQ ID NO: 17955 - DNA, 80 bp, synthetic construct
  misc_feature 1..80: note = Synthetic: >JQ065046_6-cand-100-179
  source 1..80: mol_type = other DNA
catctggattcgtaaaccaaaatttattttggttaagtcttggtcagtcttaggcactgtgttctgtaaaacaggctcag

SEQ ID NO: 17956 - DNA, 80 bp, synthetic construct
  misc_feature 1..80: note = Synthetic: >JQ065046_6-cand-180-259
  source 1..80: mol_type = other DNA
tggtcttttgcagtgccaagctccttcttcgcttctataaccaccttgttgaaataggggctatagatgctaccgttagg

SEQ ID NO: 17957 - DNA, 80 bp, synthetic construct
  misc_feature 1..80: note = Synthetic: >JQ065046_6-cand-280-359
  source 1..80: mol_type = other DNA
taaagttgctcggcagtttataccgagtgctaacactgtgcgcaagacatgcctgggtcttctttattccacaaagacga

SEQ ID NO: 17958 - DNA, 80 bp, synthetic construct
  misc_feature 1..80: note = Synthetic: >JQ065046_6-cand-380-459
  source 1..80: mol_type = other DNA
ttccttatgctccctgcagtcactagtatctttgctactggctacactataggagcttatctttatgctcgtactggctg

SEQ ID NO: 17959 - DNA, 80 bp, synthetic construct
  misc_feature 1..80: note = Synthetic: >JQ065046_6-cand-480-559
  source 1..80: mol_type = other DNA
ccacccactacgactataatgcattttgtgctggcgatttgatatgcttaacgtgtttcaatggccaggactccctacat

SEQ ID NO: 17960 - DNA, 80 bp, synthetic construct
  misc_feature 1..80: note = Synthetic: >JQ065046_6-cand-580-659
  source 1..80: mol_type = other DNA
caatcagcagcctattgcagctactgactacacgctctatgctttggcatttattttattgctagccaatgcttcacttg

SEQ ID NO: 17961 - DNA, 80 bp, synthetic construct
  misc_feature 1..80: note = Synthetic: >JQ065046_6-cand-630-709
  source 1..80: mol_type = other DNA
ttattttattgctagccaatgcttcacttgttgttgctgcgctggcatttgccttcattgtcaacatgtatggtgttgaa

SEQ ID NO: 17962 - DNA, 80 bp, synthetic construct
  misc_feature 1..80: note = Synthetic: >JQ065046_7-cand-0-79
  source 1..80: mol_type = other DNA
ctactactaagtctgacattcgcgtctctaatttttacgttattagggacggggtgctggacactatccgttcaacagac

SEQ ID NO: 17963 - DNA, 80 bp, synthetic construct
  misc_feature 1..80: note = Synthetic: >JQ065046_7-cand-80-159
  source 1..80: mol_type = other DNA
aattgctttgctaataagttcttgtcttttgactcttttcatcaagcaccgtacactgactcaccagcctgtccggttgt

SEQ ID NO: 17964 - DNA, 80 bp, synthetic construct
  misc_feature 1..80: note = Synthetic: >JQ065046_7-cand-170-249
  source 1..80: mol_type = other DNA
gcggatgtaaaaactcaatccgttccaggaattcctgctggattagttatgagagacaacctcgttcttcacatttacga

SEQ ID NO: 17965 - DNA, 80 bp, synthetic construct
  misc_feature 1..80: note = Synthetic: >JQ065046_7-cand-260-339
  source 1..80: mol_type = other DNA
tatgaaagagatcagcgtgcttcaatggttagggacgcattggcgcttcgcaccaatagcatctttaatcttgataaccg

SEQ ID NO: 17966 - DNA, 80 bp, synthetic construct
  misc_feature 1..80: note = Synthetic: >JQ065046_7-cand-350-429
  source 1..80: mol_type = other DNA
ggctacacgcaatacgaagttgttgtaggtagctcatatataagatcaccagcattgtttaatgctaagtgtacctacct

SEQ ID NO: 17967 - DNA, 80 bp, synthetic construct
  misc_feature 1..80: note = Synthetic: >JQ065046_7-cand-440-519
  source 1..80: mol_type = other DNA
ggcaatagaacgctctactgctatgacgctgttgataggcctcataaactctactctgaggttcttcctcatgtggagta

SEQ ID NO: 17968 - DNA, 80 bp, synthetic construct
  misc_feature 1..80: note = Synthetic: >JQ065046_7-cand-530-609
  source 1..80: mol_type = other DNA
gactttaatggtgatgttgttccctttaagataccggagcagatcatctactaccctcatgttgtccgctacgtcagtaa

SEQ ID NO: 17969 - DNA, 80 bp, synthetic construct
  misc_feature 1..80: note = Synthetic: >JQ065046_7-cand-620-699
  source 1..80: mol_type = other DNA
cgtatggggcactgctttaacactaatcctggcatctgtgtctcatttacggatgacttcccgtactctgagaataatgt

SEQ ID NO: 17970 - DNA, 80 bp, synthetic construct
  misc_feature 1..80: note = Synthetic: >JQ065046_7-cand-710-789
  source 1..80: mol_type = other DNA
tattgtgccgatactacctttaagcttgcctccaagctccttgtgggtactgtgtctggcattcatgtctttacatcaac

SEQ ID NO: 17971 - DNA, 80 bp, synthetic construct
  misc_feature 1..80: note = Synthetic: >JQ065046_7-cand-900-979
  source 1..80: mol_type = other DNA
tcgctgttgttaaccttgttggcattgcgcttatgtataagtgcattgcccttgcattcctattctatgcaatttacttg

SEQ ID NO: 17972 - DNA, 80 bp, synthetic construct
  misc_feature 1..80: note = Synthetic: >JQ065046_8-cand-0-79
  source 1..80: mol_type = other DNA
gggggcgctcacattgacttttacttattcgatcacagtcaagccggactccccagattatgacagattaaaggaggctc

SEQ ID NO: 17973 - DNA, 80 bp, synthetic construct
  misc_feature 1..80: note = Synthetic: >JQ065046_8-cand-80-159
  source 1..80: mol_type = other DNA
ttagctctgttgttaatcagacctatgaggcacctaccaaacctgttaaggccaagaagcctgaatctgaccaatcctcc

SEQ ID NO: 17974 - DNA, 80 bp, synthetic construct
  misc_feature 1..80: note = Synthetic: >JQ065046_8-cand-170-249
  source 1..80: mol_type = other DNA
agccgaggaagcagaagaatagcaagccatctgacaaggaggcccctgctgactcagaccagttagagtgggacaatgcg

SEQ ID NO: 17975 - DNA, 80 bp, synthetic construct
  misc_feature 1..80: note = Synthetic: >JQ065046_8-cand-260-339
  source 1..80: mol_type = other DNA
agagctcggatgcgtagacaccaatctaatgatcatagacctcacttcctatcattcacatctcagtggggttcttagga

SEQ ID NO: 17976 - DNA, 80 bp, synthetic construct
  misc_feature 1..80: note = Synthetic: >JQ065046_8-cand-350-429
  source 1..80: mol_type = other DNA
catcttttccattgccctcttcgacgaatacgaaggcgcattttgggtgtctggccattttattgaatcactctcctttg

SEQ ID NO: 17977 - DNA, 80 bp, synthetic construct
  misc_feature 1..80: note = Synthetic: >JQ065046_8-cand-440-519
  source 1..80: mol_type = other DNA
ttatgtttcagaggaagactaaattgatctaccccttgtgtgggtcccatgaaacatttgtgcctgattcatgctccagc

SEQ ID NO: 17978 - DNA, 80 bp, synthetic construct
  misc_feature 1..80: note = Synthetic: >JQ065046_8-cand-530-609
  source 1..80: mol_type = other DNA
cgtgcgacatatcctccatgtcgccctaccagccctatattgctgaatcattcaagctcatcctagcggagattgctgag

SEQ ID NO: 17979 - DNA, 80 bp, synthetic construct
  misc_feature 1..80: note = Synthetic: >JQ065046_8-cand-620-699
  source 1..80: mol_type = other DNA
ccagctcaccccatgccattctccgctactcggaacctggcttgaagatttggaaagttcactggcagcgcggtggtgat

SEQ ID NO: 17980 - DNA, 80 bp, synthetic construct
  misc_feature 1..80: note = Synthetic: >JQ065046_8-cand-710-789
  source 1..80: mol_type = other DNA
gccattgcatcactgtcttccagaaacagggcatccgctcaggcgactgggaatcgtatgatttcagcacgcacagtgtt

SEQ ID NO: 17981 - DNA, 80 bp, synthetic construct
  misc_feature 1..80: note = Synthetic: >JQ065046_8-cand-800-879
  source 1..80: mol_type = other DNA
cttcacctccataatagtttacatgggtactagccagtctactaccaatgtaaacaatcagatcactaatattcatgctt

SEQ ID NO: 17982 - DNA, 80 bp, synthetic construct
  misc_feature 1..80: note = Synthetic: >JQ065046_8-cand-990-1069
  source 1..80: mol_type = other DNA
gagtctgcagtcataatccacctattgagaaggatacgtcgtctcaaggcgcgtcctccaaaaaccactttattaccaac

SEQ ID NO: 17983 - DNA, 80 bp, synthetic construct
  misc_feature 1..80: note = Synthetic: >JQ065046_9-cand-0-79
  source 1..80: mol_type = other DNA
ctctttcctgaccaccgctgtcaggaccactggtatgactcccaaaaccctatctgtctaggctggaataacacttttgg

SEQ ID NO: 17984 - DNA, 80 bp, synthetic construct
  misc_feature 1..80: note = Synthetic: >JQ065046_9-cand-80-159
  source 1..80: mol_type = other DNA
cctttccgacaatatccgcatcaacattaacatatcccacgatgagtaccaatcacatggaggttatgttagcttaacac

SEQ ID NO: 17985 - DNA, 80 bp, synthetic construct
  misc_feature 1..80: note = Synthetic: >JQ065046_9-cand-160-239
  source 1..80: mol_type = other DNA
ttgagtcgggttctgttgttaatatcacttgcactaacaactccgacccatcaacggttactctagccacatcgctactg

SEQ ID NO: 17986 - DNA, 80 bp, synthetic construct
  misc_feature 1..80: note = Synthetic: >JQ065046_9-cand-250-329
  source 1..80: mol_type = other DNA
gggccatagatcagccgatgtattgctttgccaacctcaccacaggcactgcatctcagctggattttatgggtatgtta

SEQ ID NO: 17987 - DNA, 80 bp, synthetic construct
  misc_feature 1..80: note = Synthetic: >JQ065046_9-cand-460-539
  source 1..80: mol_type = other DNA
tcgccgttacttgggctaattatactgacgtccatcttagcgtagatgctggcgccattgagaaaattaagtattgcaac

SEQ ID NO: 17988 - DNA, 80 bp, synthetic construct
  misc_feature 1..80: note = Synthetic: >JQ065046_9-cand-550-629
  source 1..80: mol_type = other DNA
acaggttggcgtgtgacatgaatgtctttaatctaagtgatggggtctactcctacacctcacttgaaaaagccagcgtt

SEQ ID NO: 17989 - DNA, 80 bp, synthetic construct
  misc_feature 1..80: note = Synthetic: >JQ065046_9-cand-640-719
  source 1..80: mol_type = other DNA
ttgtaacgctgcccgtctattcaaaccatacgtatgtgacaattaacacctcctacaccgttggtagctgtgttaattgt

SEQ ID NO: 17990 - DNA, 80 bp, synthetic construct
  misc_feature 1..80: note = Synthetic: >JQ065046_9-cand-730-809
  source 1..80: mol_type = other DNA
cctccaccattgacatcatgcacgcacgtaatgataccttatgtgttaattctagacaattcaccgtccgtcttaacacc

SEQ ID NO: 17991 - DNA, 80 bp, synthetic construct
  misc_feature 1..80: note = Synthetic: >JQ065046_9-cand-820-899
  source 1..80: mol_type = other DNA
cgcagtaccctcagtactttagtactgcatttgtagcgggcacttgtccttttacgctacccaatattaataattattta

SEQ ID NO: 17992 - DNA, 80 bp, synthetic construct
  misc_feature 1..80: note = Synthetic: >JQ065046_9-cand-890-969
  source 1..80: mol_type = other DNA
taattatttaacatttggtagcgtttgtttttccaccgttaacaatggtggttgcaccatccatgtccagaaggtttgga

SEQ ID NO: 17993 - DNA, 80 bp, synthetic construct
  misc_feature 1..80: note = Synthetic: >JQ065046_9-cand-960-1039
  source 1..80: mol_type = other DNA
aaggtttggaaccaccaataccacacctttggcaccatctatgttgcctaccaagatggcaactacatcacagctctgcc

SEQ ID NO: 17994 - DNA, 80 bp, synthetic construct
  misc_feature 1..80: note = Synthetic: >JQ065046_9-cand-1050-1129
  source 1..80: mol_type = other DNA
actggtgttgctgacatctccactgtccatcttgatgtctgtaccaaatactccatttatggtaagacgggtacgggcgt

SEQ ID NO: 17995 - DNA, 80 bp, synthetic construct
  misc_feature 1..80: note = Synthetic: >JQ065046_9-cand-1140-1219
  source 1..80: mol_type = other DNA
acgaatcagtcctacactgccgggctctattacacttcttcttctggagatttgttagcgttcaaaaacgtaaccaccca

SEQ ID NO: 17996 - DNA, 80 bp, synthetic construct
  misc_feature 1..80: note = Synthetic: >JQ065046_9-cand-1230-1309
  source 1..80: mol_type = other DNA
tctgtaaccccctgcacccttgctagtcaggttgcggtttacaacaactctatcctggcagcattcacctccacggcgaa

SEQ ID NO: 17997 - DNA, 80 bp, synthetic construct
  misc_feature 1..80: note = Synthetic: >JQ065046_9-cand-1320-1399
  source 1..80: mol_type = other DNA
atagatttcaattacacaatcgctactcccaccttttactaccattccattggtaatgagacgtgcgagcagcctgttat

SEQ ID NO: 17998 - DNA, 80 bp, synthetic construct
  misc_feature 1..80: note = Synthetic: >JQ065046_9-cand-1410-1489
  source 1..80: mol_type = other DNA
tccataggtctctgtcccgggggtggccttcgccttgcccaccccacggaggatgcagcccctattttggttccgatttc

SEQ ID NO: 17999 - DNA, 80 bp, synthetic construct
  misc_feature 1..80: note = Synthetic: >JQ065046_9-cand-1500-1579
  source 1..80: mol_type = other DNA
atttccatacccaagaactttactgtatctattcaaactgaatacatacagatcgagcaacagcctgttgtagttgactg

SEQ ID NO: 18000 - DNA, 80 bp, synthetic construct
  misc_feature 1..80: note = Synthetic: >JQ065046_9-cand-1580-1659
  source 1..80: mol_type = other DNA
ccggcagtatgtttgcaatggcaaccctcgctgcttacagttacttcagcaatacacctctgcatgctccaccatagagc

SEQ ID NO: 18001 - DNA, 80 bp, synthetic construct
  misc_feature 1..80: note = Synthetic: >JQ065047_1-cand-30-109
  source 1..80: mol_type = other DNA
attttactcctcctcgcttcgcgagacaaaccccgacaccgatccccctagtggcctagccactacgggcattaataacc

SEQ ID NO: 18002 - DNA, 80 bp, synthetic construct
  misc_feature 1..80: note = Synthetic: >JQ065047_10-cand-0-79
  source 1..80: mol_type = other DNA
ggagtttctctccagaaactagactacttgtgtgtgcaattgatggaatgggtaatgtcaaatgtgcaccagtagatcat

SEQ ID NO: 18003 - DNA, 80 bp, synthetic construct
  misc_feature 1..80: note = Synthetic: >JQ065047_10-cand-50-129
  source 1..80: mol_type = other DNA
ggtaatgtcaaatgtgcaccagtagatcatttaccaacagctctcactcctgtccttgtaatgggaaggtttatgctaaa

SEQ ID NO: 18004 - DNA, 80 bp, synthetic construct
  misc_feature 1..80: note = Synthetic: >JQ065047_10-cand-140-219
  source 1..80: mol_type = other DNA
cttatggcacaacaaactgtgcagacagctcctagagctttgtatgtcatgacaccgagtcagacatatcattttacttt

SEQ ID NO: 18005 - DNA, 80 bp, synthetic construct
  misc_feature 1..80: note = Synthetic: >JQ065047_10-cand-230-309
  source 1..80: mol_type = other DNA
tttcaagatccagacttcaaagacacagccacattttgttaccttgtcgaccgcatttccaaggcagatttgcagagtgt

SEQ ID NO: 18006 - DNA, 80 bp, synthetic construct
  misc_feature 1..80: note = Synthetic: >JQ065047_10-cand-320-399
  source 1..80: mol_type = other DNA
agcaattacgcactgtacaaacacctttaatgtgcaactgcaaaaagcacctaaagcaccttaaagatgcatgtttgtat

SEQ ID NO: 18007 - DNA, 80 bp, synthetic construct
  misc_feature 1..80: note = Synthetic: >JQ065047_10-cand-410-489
  source 1..80: mol_type = other DNA
agagctacacttactttattgatgacccattcacagaaattaaatgttttgctcttacacttactactcttgtgcgtagt

SEQ ID NO: 18008 - DNA, 80 bp, synthetic construct
  misc_feature 1..80: note = Synthetic: >JQ065047_10-cand-500-579
  source 1..80: mol_type = other DNA
ttagtcactcgttacctaatacttattgcattaacaatgaatacttttgcttgcaaaatggtcgttcgttcaatgcagag

SEQ ID NO: 18009 - DNA, 80 bp, synthetic construct
  misc_feature 1..80: note = Synthetic: >JQ065047_10-cand-590-669
  source 1..80: mol_type = other DNA
ctccaaacattgaagttggaataattaataacacctaatcttacagaatggctgtcccgcgtgtgccacgcgctgacgca

SEQ ID NO: 18010 - DNA, 80 bp, synthetic construct
  misc_feature 1..80: note = Synthetic: >JQ065047_10-cand-680-759
  source 1..80: mol_type = other DNA
agcctattaaggctcagaataagaaaatcacagcaccttctttcaagaagaatggtgttcccgtaaatgcatcactccag

SEQ ID NO: 18011 - DNA, 80 bp, synthetic construct
  misc_feature 1..80: note = Synthetic: >JQ065047_10-cand-770-849
  source 1..80: mol_type = other DNA
aacacggctactggttgagatacaacagaacaaaatctggaggaggatcaatacctgcagcattctccttttattacaca

SEQ ID NO: 18012 - DNA, 80 bp, synthetic construct
  misc_feature 1..80: note = Synthetic: >JQ065047_10-cand-860-939
  source 1..80: mol_type = other DNA
cttatgcaactctaaaattcggtgagactccgtctgaccgtattacttgggtcaaaggacctagtgctgtcacaaccaac

SEQ ID NO: 18013 - DNA, 80 bp, synthetic construct
  misc_feature 1..80: note = Synthetic: >JQ065047_10-cand-950-1029
  source 1..80: mol_type = other DNA
tcgccaaacgcgacccagacaaacacccactacttcctctcacttttccacctggagatggagtaaacacaggactgcgt

SEQ ID NO: 18014 - DNA, 80 bp, synthetic construct
  misc_feature 1..80: note = Synthetic: >JQ065047_10-cand-1040-1119
  source 1..80: mol_type = other DNA
ttcaaaacagaggcagaaccatggacagaggtcccaaccaacgttcatcatctgcccctgttgactcaggaaatcgcaat

SEQ ID NO: 18015 - DNA, 80 bp, synthetic construct
  misc_feature 1..80: note = Synthetic: >JQ065047_10-cand-1260-1339
  source 1..80: mol_type = other DNA
agacactgaaaaagcagggtttacggacccaagactaatgtgccttatgagacatactcctggcactcaagaattacttc

SEQ ID NO: 18016 - DNA, 80 bp, synthetic construct
  misc_feature 1..80: note = Synthetic: >JQ065047_11-cand-0-79
  source 1..80: mol_type = other DNA
caagaagatgggctctaaacaggtagaccacacctgtctaaccataccaccaaacccttctaaaacgctggctctcttta

SEQ ID NO: 18017 - DNA, 80 bp, synthetic construct
  misc_feature 1..80: note = Synthetic: >JQ065047_11-cand-60-139
  source 1..80: mol_type = other DNA
taaaacgctggctctctttataacaacagtggctgcgcaagaaggtaaaacctttaagacagttgatgatgtcaagacta

SEQ ID NO: 18018 - DNA, 80 bp, synthetic construct
  misc_feature 1..80: note = Synthetic: >JQ065047_11-cand-140-219
  source 1..80: mol_type = other DNA
tttctaagttcaacatccgccgtgggaatgtagtaccaggcatacttgcacttgacaatcatacaactctttctgatttt

SEQ ID NO: 18019 - DNA, 80 bp, synthetic construct
  misc_feature 1..80: note = Synthetic: >JQ065047_11-cand-220-299
  source 1..80: mol_type = other DNA
gaaaatctggttggtattcaaccagtcttaagaactcttcgagagcttcttaagtcatctgactgggcagagactactga

SEQ ID NO: 18020 - DNA, 80 bp, synthetic construct
  misc_feature 1..80: note = Synthetic: >JQ065047_11-cand-310-389
  source 1..80: mol_type = other DNA
agaaagaccatggatttaacatggtctaaacaactctgccgtgcaatcatgctctacggcagtgttaaactatcttcgtt

SEQ ID NO: 18021 - DNA, 80 bp, synthetic construct
  misc_feature 1..80: note = Synthetic: >JQ065047_11-cand-390-469
  source 1..80: mol_type = other DNA
agcatccttagtttattacaacaaggtgctaggaattaaacaaggtccattatctgacgtgatgcgagacatagtgctta

SEQ ID NO: 18022 - DNA, 80 bp, synthetic construct
  misc_feature 1..80: note = Synthetic: >JQ065047_11-cand-470-549
  source 1..80: mol_type = other DNA
ctgaggccgttaatggtacacttgcccaaaagttacttcacttcacaaaagtagaagtaaagcaaactgatgactatttg

SEQ ID NO: 18023 - DNA, 80 bp, synthetic construct
  misc_feature 1..80: note = Synthetic: >JQ065047_11-cand-560-639
  source 1..80: mol_type = other DNA
agaaaggagagctctctgatatgtttaaggccaaattgttgctcctctctgaaaatcgcaatggtttctaccagtacaaa

SEQ ID NO: 18024 - DNA, 80 bp, synthetic construct
  misc_feature 1..80: note = Synthetic: >JQ065047_11-cand-650-729
  source 1..80: mol_type = other DNA
tctggccagcagccactgccttaaaaacagagaatacaatgcaacttttgtaccaacaacctttacctgtagtagaaggt

SEQ ID NO: 18025 - DNA, 80 bp, synthetic construct
  misc_feature 1..80: note = Synthetic: >JQ065047_11-cand-730-809
  source 1..80: mol_type = other DNA
aatgccattggtacaaagaacattaaattagcaccaacaaaaaccactataaaaacccctgtcacaggagatgtggttcg

SEQ ID NO: 18026 - DNA, 80 bp, synthetic construct
  misc_feature 1..80: note = Synthetic: >JQ065047_11-cand-810-889
  source 1..80: mol_type = other DNA
cattggtgatatcaattacatcatacaacaagacaacccaccgtactatttacctttagtagatggtggtgttgcacccc

SEQ ID NO: 18027 - DNA, 80 bp, synthetic construct
  misc_feature 1..80: note = Synthetic: >JQ065047_11-cand-900-979
  source 1..80: mol_type = other DNA
tgaaattggtacagtcttcaagactgtaaaagtcacatttcacgcacctccaagtgacatacttcacaacttaatcaccc

SEQ ID NO: 18028 - DNA, 80 bp, synthetic construct
  misc_feature 1..80: note = Synthetic: >JQ065047_11-cand-990-1069
  source 1..80: mol_type = other DNA
agcacgtggagcaatcatagactttgaaaaaggtactgatgtaggtgaaaatgtgaaagtttatgttggaccttctcaac

SEQ ID NO: 18029 - DNA, 80 bp, synthetic construct
  misc_feature 1..80: note = Synthetic: >JQ065047_11-cand-1080-1159
  source 1..80: mol_type = other DNA
ggtagcgcgtgatgatgaagattacatcaagtgcttccaaaaggaccaggttaggactctctataacaccataaaggatg

SEQ ID NO: 18030 - DNA, 80 bp, synthetic construct
  misc_feature 1..80: note = Synthetic: >JQ065047_11-cand-1170-1249
  source 1..80: mol_type = other DNA
gcaactttacactcttcaaggtagtgttgttgacaatgtttttccactctttcacaaacttctgtcatggcttaacaagg

SEQ ID NO: 18031 - DNA, 80 bp, synthetic construct
  misc_feature 1..80: note = Synthetic: >JQ065047_11-cand-1250-1329
  source 1..80: mol_type = other DNA
tctcagacctctgtggaggtgcactctctgcacttgtggctagcgtgacagaacaacttcttaatattaaagtaagcatt

SEQ ID NO: 18032 - DNA, 80 bp, synthetic construct
  misc_feature 1..80: note = Synthetic: >JQ065047_11-cand-1330-1409
  source 1..80: mol_type = other DNA
gtgatgcagctaactaatcttcaactggtagcaaagtctacacttgagttggctactaacatcacacagcttagcactat

SEQ ID NO: 18033 - DNA, 80 bp, synthetic construct
  misc_feature 1..80: note = Synthetic: >JQ065047_11-cand-1410-1489
  source 1..80: mol_type = other DNA
cttaaaccctttatttacagcaataaaggagcattctaagaaacttttcaacatgttcacgttgtcaatcacaaaagatc

SEQ ID NO: 18034 - DNA, 80 bp, synthetic construct
  misc_feature 1..80: note = Synthetic: >JQ065047_11-cand-1490-1569
  source 1..80: mol_type = other DNA
aattgatcttctttgatgatgacgacgtgtttgttgcaaatgtaacatctgacacaccagtccaaggtactgtttacaat

SEQ ID NO: 18035 - DNA, 80 bp, synthetic construct
  misc_feature 1..80: note = Synthetic: >JQ065047_11-cand-1570-1649
  source 1..80: mol_type = other DNA
ttttcaacagatgttgtcgtaaattgtactggtgatgtttacacttccacctgtgattatattaaacccacaggtaaaaa

SEQ ID NO: 18036 - DNA, 80 bp, synthetic construct
  misc_feature 1..80: note = Synthetic: >JQ065047_12-cand-0-79
  source 1..80: mol_type = other DNA
attacaatctttttacaacagcagttaatgccacttcctcagaagtatggctctgttgtttcaattaccttaatgaatgc

SEQ ID NO: 18037 - DNA, 80 bp, synthetic construct
  misc_feature 1..80: note = Synthetic: >JQ065047_12-cand-90-169
  source 1..80: mol_type = other DNA
taaatggagaacagctgcattcatcttacatattatggagaaacgaaacaatattaacaccgacttattctactcttgct

SEQ ID NO: 18038 - DNA, 80 bp, synthetic construct
  misc_feature 1..80: note = Synthetic: >JQ065047_12-cand-170-249
  source 1..80: mol_type = other DNA
gataacaacggactttgcttcaaactgaaagcaacgccttgtgtcacggagaaggaatacgtgaaaaaacctatactaaa

SEQ ID NO: 18039 - DNA, 80 bp, synthetic construct
  misc_feature 1..80: note = Synthetic: >JQ065047_12-cand-250-329
  source 1..80: mol_type = other DNA
actacttgttgcagagggtaagttgcttgtaaagccacccacaagatgcaatgtgttgttttagttttaacattaatttc

SEQ ID NO: 18040 - DNA, 80 bp, synthetic construct
  misc_feature 1..80: note = Synthetic: >JQ065047_12-cand-330-409
  source 1..80: mol_type = other DNA
aatagtaacatcaagacccaattctttcgcggatagagtctttgatgccctcacattcccacatgcatctaactatctgc

SEQ ID NO: 18041 - DNA, 80 bp, synthetic construct
  misc_feature 1..80: note = Synthetic: >JQ065047_12-cand-410-489
  source 1..80: mol_type = other DNA
atgtgggtgataaaacgccttcgagaccacaactattacaggccagaaatcaaggaaattatagtgccatctgtcctgaa

SEQ ID NO: 18042 - DNA, 80 bp, synthetic construct
  misc_feature 1..80: note = Synthetic: >JQ065047_12-cand-490-569
  source 1..80: mol_type = other DNA
aatggttacattacaagcacctcttatgatctatctaagatttattatcttacagacggtgattatccaatagatggtgt

SEQ ID NO: 18043 - DNA, 80 bp, synthetic construct
  misc_feature 1..80: note = Synthetic: >JQ065047_12-cand-570-649
  source 1..80: mol_type = other DNA
gtataaatcccttcaacctcttaaagttacttgtgttccagaatggcatggcaactctaactttaatgacaccactggct

SEQ ID NO: 18044 - DNA, 80 bp, synthetic construct
  misc_feature 1..80: note = Synthetic: >JQ065047_12-cand-650-729
  source 1..80: mol_type = other DNA
ggaaacattattttgatggtcgcataaaacaaaaccctaacaccatatggtgtccatgttcgcaatctggacctggcggt

SEQ ID NO: 18045 - DNA, 80 bp, synthetic construct
  misc_feature 1..80: note = Synthetic: >JQ065047_12-cand-730-809
  source 1..80: mol_type = other DNA
gcgcagcataatgcagcaggtaattctacggaatatattaggtttcactctaatattaccacatccgttagcaacctgct

SEQ ID NO: 18046 - DNA, 80 bp, synthetic construct
  misc_feature 1..80: note = Synthetic: >JQ065047_12-cand-810-889
  source 1..80: mol_type = other DNA
gcgcctttatgctgtagacaaccaatattactattttggttgcacccctactccaacaccactcacatttaatcttacat

SEQ ID NO: 18047 - DNA, 80 bp, synthetic construct
  misc_feature 1..80: note = Synthetic: >JQ065047_12-cand-900-979
  source 1..80: mol_type = other DNA
aacattgttcaccgctgaagagcaagtgcactactgttatgctaatataaatggtactgtctcatacataggagtattac

SEQ ID NO: 18048 - DNA, 80 bp, synthetic construct
  misc_feature 1..80: note = Synthetic: >JQ065047_12-cand-980-1059
  source 1..80: mol_type = other DNA
caccaaaaattaccgagctcactgttggccgctatggtgacatatttgtcaacggttttctctattttaaaatacccaat

SEQ ID NO: 18049 - DNA, 80 bp, synthetic construct
  misc_feature 1..80: note = Synthetic: >JQ065047_12-cand-1070-1149
  source 1..80: mol_type = other DNA
atgtacagttgtcacataccataccacataacaaacaattttacactgtgttctatgctaatatgacacaagtgcttcta

SEQ ID NO: 18050 - DNA, 80 bp, synthetic construct
  misc_feature 1..80: note = Synthetic: >JQ065047_12-cand-1160-1239
  source 1..80: mol_type = other DNA
tggcatctattaatagattgctttattgtgacaaagactcctattcttctatagcatgtgcagtcaaccagtttgagcct

SEQ ID NO: 18051 - DNA, 80 bp, synthetic construct
  misc_feature 1..80: note = Synthetic: >JQ065047_12-cand-1240-1319
  source 1..80: mol_type = other DNA
gctaatggtttttactcaacctctgctatagaaaaaatatccaggaagtttacgtttgtcaccatgccgactgttcagaa

SEQ ID NO: 18052 - DNA, 80 bp, synthetic construct
  misc_feature 1..80: note = Synthetic: >JQ065047_12-cand-1320-1399
  source 1..80: mol_type = other DNA
tcacagttattactccataaacctaaccataggaggctgtgggcatggtgaatatccacacctgtctaataaaacaggtt

SEQ ID NO: 18053 - DNA, 80 bp, synthetic construct
  misc_feature 1..80: note = Synthetic: >JQ065047_12-cand-1400-1479
  source 1..80: mol_type = other DNA
gttaccgcactgatgcctcaaacattaatgcaaaacaaatcacatttgttattaacacatatactcatgacaattggatc

SEQ ID NO: 18054 - DNA, 80 bp, synthetic construct
  misc_feature 1..80: note = Synthetic: >JQ065047_12-cand-1480-1559
  source 1..80: mol_type = other DNA
caatgggcacacaagccaggaaattgcccatgggctttaaataaaattaacaattataacacagctggaaccttgcaagt

SEQ ID NO: 18055 - DNA, 80 bp, synthetic construct
  misc_feature 1..80: note = Synthetic: >JQ065047_12-cand-1560-1639
  source 1..80: mol_type = other DNA
ggtaccagaaaatcaagcaacatgttgtacagacaatcaggctagctggttatatcttgcatcatggacctcagtaaatg

SEQ ID NO: 18056 - DNA, 80 bp, synthetic construct
  misc_feature 1..80: note = Synthetic: >JQ065047_12-cand-1640-1719
  source 1..80: mol_type = other DNA
ttaaagtttgctttaactatcagccaggtacaacaattagtattcaaccacaacaaactggcgtagcaactgatatatca

SEQ ID NO: 18057 - DNA, 80 bp, synthetic construct
  misc_feature 1..80: note = Synthetic: >JQ065047_12-cand-1720-1799
  source 1..80: mol_type = other DNA
gttatctacgagaatgagtgtgttgattacaacatctatggaaaaactggcacaggaattatccagtccacaaatgtcac

SEQ ID NO: 18058 - DNA, 80 bp, synthetic construct
  misc_feature 1..80: note = Synthetic: >JQ065047_12-cand-1800-1879
  source 1..80: mol_type = other DNA
tttgctagctggcagaacctatacttcagcttctggtcaactattagcatttaaatatctgtctaatcagactatttatt

SEQ ID NO: 18059 - DNA, 80 bp, synthetic construct
  misc_feature 1..80: note = Synthetic: >JQ065047_13-cand-0-79
  source 1..80: mol_type = other DNA
ccggttattgtctatcatttactaacaagtttgtggttaatgatggtatacaacaacccggtgtttactgtggtgatacc

SEQ ID NO: 18060 - DNA, 80 bp, synthetic construct
  misc_feature 1..80: note = Synthetic: >JQ065047_13-cand-80-159
  source 1..80: mol_type = other DNA
ttagttcaattgctaacaaatatgttctttggagtggtatcagctactgatataatgaagagctcaacggcacttctatt

SEQ ID NO: 18061 - DNA, 80 bp, synthetic construct
  misc_feature 1..80: note = Synthetic: >JQ065047_13-cand-160-239
  source 1..80: mol_type = other DNA
atctacttctttaatcattggtatagtattcttagttatgttgtttcagaggatctttaagcaatacacctcatttgtag

SEQ ID NO: 18062 - DNA, 80 bp, synthetic construct
  misc_feature 1..80: note = Synthetic: >JQ065047_13-cand-240-319
  source 1..80: mol_type = other DNA
gtgttgtagtcttaaatgcattcttaaacataataggtcttattatactaaccatttgcaaacctctagcctatggcttc

SEQ ID NO: 18063 - DNA, 80 bp, synthetic construct
  misc_feature 1..80: note = Synthetic: >JQ065047_13-cand-320-399
  source 1..80: mol_type = other DNA
tttggtttgtatttttatgttactttgactttaacacctataaccaggagtataatctatgtatttatggttgtaactct

SEQ ID NO: 18064 - DNA, 80 bp, synthetic construct
  misc_feature 1..80: note = Synthetic: >JQ065047_13-cand-400-479
  source 1..80: mol_type = other DNA
tttaccacatgttagcaatcttttgttgctagcattttttatagtaatgttattttataacatctataagtatgtgagag

SEQ ID NO: 18065 - DNA, 80 bp, synthetic construct
  misc_feature 1..80: note = Synthetic: >JQ065047_13-cand-480-559
  source 1..80: mol_type = other DNA
tggttaagtatacagcttcaggcggttttaagacattccttgacgcttctaaagccacttttgttatttctaatgacaag

SEQ ID NO: 18066 - DNA, 80 bp, synthetic construct
  misc_feature 1..80: note = Synthetic: >JQ065047_13-cand-560-639
  source 1..80: mol_type = other DNA
tatgttgaaatgctaaatttagcaggttcagaatatgacacatacttggcatcttacgcacgctatcgttattactctgg

SEQ ID NO: 18067 - DNA, 80 bp, synthetic construct
  misc_feature 1..80: note = Synthetic: >JQ065047_13-cand-640-719
  source 1..80: mol_type = other DNA
tactacagacagtgctgagtataataaggtgtgcatggcattcctagccaaagccttagacaactttaaaacatctggtg

SEQ ID NO: 18068 - DNA, 80 bp, synthetic construct
  misc_feature 1..80: note = Synthetic: >JQ065047_13-cand-720-799
  source 1..80: mol_type = other DNA
gttctgttctatacacaccacctaagttaactgttgtacaagcaggcattaaaagactcttgagcccttcaggttcagta

SEQ ID NO: 18069 - DNA, 80 bp, synthetic construct
  misc_feature 1..80: note = Synthetic: >JQ065047_13-cand-800-879
  source 1..80: mol_type = other DNA
gaaaaatgcatggtctctgttcattacagaggattaacattaaatggtatctggttaaataatgttatttattgtcctcg

SEQ ID NO: 18070 - DNA, 80 bp, synthetic construct
  misc_feature 1..80: note = Synthetic: >JQ065047_13-cand-880-959
  source 1..80: mol_type = other DNA
ccacatcttaggcaaatatcaagcctcattttggcaggatgcagttaaagtagcagatactagagattttgttatcaatt

SEQ ID NO: 18071 - DNA, 80 bp, synthetic construct
  misc_feature 1..80: note = Synthetic: >JQ065047_13-cand-960-1039
  source 1..80: mol_type = other DNA
ctcaacactctaaaattcaatttagacctgttggtttaagacttaataatgcaatcttacagattgtattaccaactgag

SEQ ID NO: 18072 - DNA, 80 bp, synthetic construct
  misc_feature 1..80: note = Synthetic: >JQ065047_13-cand-1040-1119
  source 1..80: mol_type = other DNA
cagaacaatcctcatacaccagattatgaatttgtcactgctaaaccaggttcatcgatgacaatagcttgcacttatga

SEQ ID NO: 18073 - DNA, 80 bp, synthetic construct
  misc_feature 1..80: note = Synthetic: >JQ065047_13-cand-1120-1199
  source 1..80: mol_type = other DNA
tggtattgtttctgcaatctatcatgttataatgcaaactaatggtctcatctatgcttcatttatgaatggtgcgtgtg

SEQ ID NO: 18074 - DNA, 80 bp, synthetic construct
  misc_feature 1..80: note = Synthetic: >JQ065047_13-cand-1200-1279
  source 1..80: mol_type = other DNA
gttcagtagggtacactcttaaaaatggtaaactactcttacactacatgcaccatttggaatttaacaataaaactcat

SEQ ID NO: 18075 - DNA, 80 bp, synthetic construct
  misc_feature 1..80: note = Synthetic: >JQ065047_13-cand-1280-1359
  source 1..80: mol_type = other DNA
ggcggtacagatttgaatggcaacttctatggagattatattgatgaagaaatagcacagtctatttcaaaagcagctac

SEQ ID NO: 18076 - DNA, 80 bp, synthetic construct
  misc_feature 1..80: note = Synthetic: >JQ065047_13-cand-1360-1439
  source 1..80: mol_type = other DNA
tctcactgataatgcacttgctcatatttatgcgcatttgtcaacgatatcaaccaaacccaaatggttgtcttatcaag

SEQ ID NO: 18077 - DNA, 80 bp, synthetic construct
  misc_feature 1..80: note = Synthetic: >JQ065047_13-cand-1440-1519
  source 1..80: mol_type = other DNA
aattatcagttgaagattttaatgattgggccaagaataatgaccatactcaatttccatcttgtgatgaaaattatact

SEQ ID NO: 18078 - DNA, 80 bp, synthetic construct
  misc_feature 1..80: note = Synthetic: >JQ065047_13-cand-1520-1599
  source 1..80: mol_type = other DNA
tatcttgacgcattagcaaagtctacaggtgtttctattaagagagtactctcaacattagtaacactacatactaattg

SEQ ID NO: 18079 - DNA, 80 bp, synthetic construct
  misc_feature 1..80: note = Synthetic: >JQ065047_13-cand-1600-1679
  source 1..80: mol_type = other DNA
gggctctgctagtgtattaggtatgtcaacttttgatcttgattttacaccagaaatggtctacaatcaggcacctatta

SEQ ID NO: 18080 - DNA, 80 bp, synthetic construct
  misc_feature 1..80: note = Synthetic: >JQ065047_13-cand-1680-1759
  source 1..80: mol_type = other DNA
cattacaaggtactaagaaatctaccatttttacttggctagcttctgtagcttttaacttcattgtttatatgacagca

SEQ ID NO: 18081 - DNA, 80 bp, synthetic construct
  misc_feature 1..80: note = Synthetic: >JQ065047_13-cand-1760-1839
  source 1..80: mol_type = other DNA
cttatgtatgtcataccaaacaatgtactttatatagtagtacctgctacattaatgactgctattgttacacagttgtt

SEQ ID NO: 18082 - DNA, 80 bp, synthetic construct
  misc_feature 1..80: note = Synthetic: >JQ065047_13-cand-1840-1919
  source 1..80: mol_type = other DNA
tattaagcatactactgtttacatgttagcatattgtctaccaatggtggtcttatgcgtttataacacctttactatct

SEQ ID NO: 18083 - DNA, 80 bp, synthetic construct
  misc_feature 1..80: note = Synthetic: >JQ065047_13-cand-1920-1999
  source 1..80: mol_type = other DNA
gggtgcctaatacaatgtttaggcagatagtttactatgcatatacatgtttctatgaaccttcaatagcacagtatatg

SEQ ID NO: 18084 - DNA, 80 bp, synthetic construct
  misc_feature 1..80: note = Synthetic: >JQ065047_13-cand-2000-2079
  source 1..80: mol_type = other DNA
gtatatttatcagtatttttagtttctataaatgctgttaagtcacttatagttgttagatctaatatgcaggcattgta

SEQ ID NO: 18085 - DNA, 80 bp, synthetic construct
  misc_feature 1..80: note = Synthetic: >JQ065047_13-cand-2080-2159
  source 1..80: mol_type = other DNA
cgctttgtataactttgtacgctcagcgctttttggttatacagcgactatgttattggattcaggtctagttaatgcaa

SEQ ID NO: 18086 - DNA, 80 bp, synthetic construct
  misc_feature 1..80: note = Synthetic: >JQ065047_13-cand-2160-2239
  source 1..80: mol_type = other DNA
cttatattgtctggtttgttgctagtatgtctccaactggttcattactggcaacacttaattggtatttagctgattac

SEQ ID NO: 18087 - DNA, 80 bp, synthetic construct
  misc_feature 1..80: note = Synthetic: >JQ065047_13-cand-2240-2319
  source 1..80: mol_type = other DNA
atagcgagtagctttcagtttgacttgttatgtaaaatgtttatctaccacaccttaggatttgtagtctgtatgcgatt

SEQ ID NO: 18088 - DNA, 80 bp, synthetic construct
  misc_feature 1..80: note = Synthetic: >JQ065047_13-cand-2320-2399
  source 1..80: mol_type = other DNA
tggtttatactggtggattaataagtttactggtatacctgtcggtacctacaaatttgtagtatcctctgaacaactta

SEQ ID NO: 18089 - DNA, 80 bp, synthetic construct
  misc_feature 1..80: note = Synthetic: >JQ065047_13-cand-2400-2479
  source 1..80: mol_type = other DNA
agtatatgatggcaactcgtatgagcccacctaagaatttcgtagaagtccttatgaccaatatgaaacttcttggtgtt

SEQ ID NO: 18090 - DNA, 80 bp, synthetic construct
  misc_feature 1..80: note = Synthetic: >JQ065047_13-cand-2480-2559
  source 1..80: mol_type = other DNA
ggcggtaaacgtgatattgccatctctacagttcagaataaaacattagacattaaggcaacagctgtaattattgcgca

SEQ ID NO: 18091 - DNA, 80 bp, synthetic construct
  misc_feature 1..80: note = Synthetic: >JQ065047_13-cand-2560-2639
  source 1..80: mol_type = other DNA
actgttggaaaaagtaggcgtaactaataaaactgaaatgtgtaagaaaattacacagttacacaataaagtattagcat

SEQ ID NO: 18092 - DNA, 80 bp, synthetic construct
  misc_feature 1..80: note = Synthetic: >JQ065047_13-cand-2640-2719
  source 1..80: mol_type = other DNA
ctaagacagcagaagaggcggaacctcatctgtatgcattattagtctatttgctaccacacttttcaagtgataatttg

SEQ ID NO: 18093 - DNA, 80 bp, synthetic construct
  misc_feature 1..80: note = Synthetic: >JQ065047_14-cand-10-89
  source 1..80: mol_type = other DNA
aactgggagccactctattatgagaaagactccaccattgaagacattgaacaactagttgaagacacactctacactgt

SEQ ID NO: 18094 - DNA, 80 bp, synthetic construct
  misc_feature 1..80: note = Synthetic: >JQ065047_14-cand-90-169
  source 1..80: mol_type = other DNA
tttgacagaacaacgtccagacttaggtgtagaccctgtagacttcattctatttaatgctgtgactaatgacacagcta

SEQ ID NO: 18095 - DNA, 80 bp, synthetic construct
  misc_feature 1..80: note = Synthetic: >JQ065047_14-cand-170-249
  source 1..80: mol_type = other DNA
caattacagatattagtagtggcaatttgacactacaaatattacctctagaggatgaaaattgctctgattctgaagac

SEQ ID NO: 18096 - DNA, 80 bp, synthetic construct
  misc_feature 1..80: note = Synthetic: >JQ065047_14-cand-250-329
  source 1..80: mol_type = other DNA
tacagtagtggttctgaagtagagtatgaagaagatgatcctacttattttgacaatggtgatgatataggagcttatcc

SEQ ID NO: 18097 - DNA, 80 bp, synthetic construct
  misc_feature 1..80: note = Synthetic: >JQ065047_14-cand-330-409
  source 1..80: mol_type = other DNA
tatagtaccattgactcctgtttttacacaaagcacaacttcttcaacattgtcagatcagaagttacgcgacgctggtg

SEQ ID NO: 18098 - DNA, 80 bp, synthetic construct
  misc_feature 1..80: note = Synthetic: >JQ065047_14-cand-410-489
  source 1..80: mol_type = other DNA
acgcccagtcagaatctgaagtgcttgtcgatacagtggattgtgtagaagaggagccatttacaccattgaagtcttat

SEQ ID NO: 18099 - DNA, 80 bp, synthetic construct
  misc_feature 1..80: note = Synthetic: >JQ065047_14-cand-490-569
  source 1..80: mol_type = other DNA
gtctcaatggataacttacaatgttctactgatgacgaggaaaccataccgattgttcctggtatggaaaatgtcatagt

SEQ ID NO: 18100 - DNA, 80 bp, synthetic construct
  misc_feature 1..80: note = Synthetic: >JQ065047_14-cand-570-649
  source 1..80: mol_type = other DNA
agatgatgaaacacagtacccacaaggagactgtgaagatatagtgtgtgaaactgatgaagagtatttttcagattcag

SEQ ID NO: 18101 - DNA, 80 bp, synthetic construct
  misc_feature 1..80: note = Synthetic: >JQ065047_14-cand-650-729
  source 1..80: mol_type = other DNA
aacaaaccttagttggtataaaccaatatctttacaacttacctgttgaagccatcattgatgaacagccaacacaggta

SEQ ID NO: 18102 - DNA, 80 bp, synthetic construct
  misc_feature 1..80: note = Synthetic: >JQ065047_14-cand-730-809
  source 1..80: mol_type = other DNA
gaatttcacattggagatattagatcgctgaaaggcttacgcaatgcaatcattgttaatgcagcaaacgagcgccttac

SEQ ID NO: 18103 - DNA, 80 bp, synthetic construct
  misc_feature 1..80: note = Synthetic: >JQ065047_14-cand-810-889
  source 1..80: mol_type = other DNA
caatggtggaggaattgcgaaggcaataagtgatctagcaggtcctgaatatcaagcttgttgtgataaagcagcaccta

SEQ ID NO: 18104 - DNA, 80 bp, synthetic construct
  misc_feature 1..80: note = Synthetic: >JQ065047_14-cand-890-969
  source 1..80: mol_type = other DNA
tatctaaaccatttttaaccaatgcatatgacttagttttctatggctatgcaggaattttacatgttgtaccaccacgt

SEQ ID NO: 18105 - DNA, 80 bp, synthetic construct
  misc_feature 1..80: note = Synthetic: >JQ065047_14-cand-970-1049
  source 1..80: mol_type = other DNA
ggtaatgacccaaatgttaagcagaagttgtatgaagcatacaaatctgtttttacaaaaccatctcattatgtcatacc

SEQ ID NO: 18106 - DNA, 80 bp, synthetic construct
  misc_feature 1..80: note = Synthetic: >JQ065047_14-cand-1050-1129
  source 1..80: mol_type = other DNA
agtactaggtgctggcatttttggatgtaaccctgtagactctcttcaagcattgaagaaagctctaccgcaaaacattg

SEQ ID NO: 18107 - DNA, 80 bp, synthetic construct
  misc_feature 1..80: note = Synthetic: >JQ065047_14-cand-1130-1209
  source 1..80: mol_type = other DNA
gtaaagtcactattatgtccttagacaaggaacataagaatatatgggatgcaataaatgcaaccatcgtgacttatacc

SEQ ID NO: 18108 - DNA, 80 bp, synthetic construct
  misc_feature 1..80: note = Synthetic: >JQ065047_14-cand-1210-1289
  source 1..80: mol_type = other DNA
tatgatatggaccaactatacacaggagctttaagtaaagatcagataagacagttgaacttatttgatggtactgatta

SEQ ID NO: 18109 - DNA, 80 bp, synthetic construct
  misc_feature 1..80: note = Synthetic: >JQ065047_14-cand-1290-1369
  source 1..80: mol_type = other DNA
tgtttctgaagctgtagctggtgttacttatttagcagttagtgacaaagtagccactagtgctaaagaactagacttaa

SEQ ID NO: 18110 - DNA, 80 bp, synthetic construct
  misc_feature 1..80: note = Synthetic: >JQ065047_14-cand-1370-1449
  source 1..80: mol_type = other DNA
caatgtctcaatactacaagtatttagactattgttccttacaatggaaagttaagaaaactaactttacacatcttgta

SEQ ID NO: 18111 - DNA, 80 bp, synthetic construct
  misc_feature 1..80: note = Synthetic: >JQ065047_14-cand-1450-1529
  source 1..80: mol_type = other DNA
gtggttagaaataattgtttcatcactgcagtcttagactttttgcaaaacacccatgtaacatttcgacaaccactaga

SEQ ID NO: 18112 - DNA, 80 bp, synthetic construct
  misc_feature 1..80: note = Synthetic: >JQ065047_14-cand-1530-1609
  source 1..80: mol_type = other DNA
tggcttatataagcagtatctaaatggtaatgttgaacaacttgttgcatggtgttatgctataaccaaccaaacacctg

SEQ ID NO: 18113 - DNA, 80 bp, synthetic construct
  misc_feature 1..80: note = Synthetic: >JQ065047_14-cand-1610-1689
  source 1..80: mol_type = other DNA
gtgacacaggtgatgcagtagctgttttatcagcattgctaaaatacaatactgataccatcattgcaacaacagagtgt

SEQ ID NO: 18114 - DNA, 80 bp, synthetic construct
  misc_feature 1..80: note = Synthetic: >JQ065047_14-cand-1690-1769
  source 1..80: mol_type = other DNA
tgcggttctaaagttgacctagatggtatgatatttacaactactcttttagatttcaaacctacagtacactgtgtaaa

SEQ ID NO: 18115 - DNA, 80 bp, synthetic construct
  misc_feature 1..80: note = Synthetic: >JQ065047_14-cand-1770-1849
  source 1..80: mol_type = other DNA
atgtgacacgtttactgggttgtcagatctacaagtaccaggtattgtagtagcttgttcaaatgctataaaacctgaag

SEQ ID NO: 18116 - DNA, 80 bp, synthetic construct
  misc_feature 1..80: note = Synthetic: >JQ065047_14-cand-1850-1929
  source 1..80: mol_type = other DNA
aatacaaaacatcattaccaactattagtcacaatgcatctggagttggtcactggttcgcagcattaaataaaggatta

SEQ ID NO: 18117 - DNA, 80 bp, synthetic construct
  misc_feature 1..80: note = Synthetic: >JQ065047_14-cand-1930-2009
  source 1..80: mol_type = other DNA
gatggttcaaacttgaaaggtgcaaccattgatgtcatttattttaagaatcaaaagcctaaaccagttgaagatgtcct

SEQ ID NO: 18118 - DNA, 80 bp, synthetic construct
  misc_feature 1..80: note = Synthetic: >JQ065047_14-cand-2010-2089
  source 1..80: mol_type = other DNA
gttggataatgttgtgttaactaataggtatcaagcactagcagttgaagagatagtacaagacactagtgaagaacctg

SEQ ID NO: 18119 - DNA, 80 bp, synthetic construct
  misc_feature 1..80: note = Synthetic: >JQ065047_14-cand-2090-2169
  source 1..80: mol_type = other DNA
ttaaacaagaagaaactaaggctgacgttgctacaactgatgttaaagtcttagataatcctgatagtcttgacatgtta

SEQ ID NO: 18120 - DNA, 80 bp, synthetic construct
  misc_feature 1..80: note = Synthetic: >JQ065047_14-cand-2170-2249
  source 1..80: mol_type = other DNA
gcattatggattgaaaaaccagcatatgttatggtcaagtcttttaaactactgggtactgtgctctttgccacaggaaa

SEQ ID NO: 18121 - DNA, 80 bp, synthetic construct
  misc_feature 1..80: note = Synthetic: >JQ065047_14-cand-2250-2329
  source 1..80: mol_type = other DNA
agttgtacagtacaccacaaaattaataacagccacttataattttctgaaaagaagtggtttgttaagtaaaactactg

SEQ ID NO: 18122 - DNA, 80 bp, synthetic construct
  misc_feature 1..80: note = Synthetic: >JQ065047_14-cand-2330-2409
  source 1..80: mol_type = other DNA
acactatcaccaacttttgcttaaaaattgttaaggataatgttaaatcttttacaacaaacattaactttaaattttta

SEQ ID NO: 18123 - DNA, 80 bp, synthetic construct
  misc_feature 1..80: note = Synthetic: >JQ065047_14-cand-2410-2489
  source 1..80: mol_type = other DNA
gctactgtttgttatacttatatgtacaacattttggctgcagtgctaccatttctgatgttaataccagtaggtagcat

SEQ ID NO: 18124 - DNA, 80 bp, synthetic construct
  misc_feature 1..80: note = Synthetic: >JQ065047_14-cand-2490-2569
  source 1..80: mol_type = other DNA
acttaagtctgctttgttgttctttaactatctacgctcatacacctcagtgtgtagcatagatattataccaaaatatg

SEQ ID NO: 18125 - DNA, 80 bp, synthetic construct
  misc_feature 1..80: note = Synthetic: >JQ065047_14-cand-2570-2649
  source 1..80: mol_type = other DNA
aagaagcaaaaccttataatttagaatctttttgttctgacaagccatactattgtatgccttgtctgcagggaaaggat

SEQ ID NO: 18126 - DNA, 80 bp, synthetic construct
  misc_feature 1..80: note = Synthetic: >JQ065047_14-cand-2650-2729
  source 1..80: mol_type = other DNA
tctatacatttctataaacatttagttgtacaatatacaacatctatgggctatgacataaatgttaccttatggtcgct

SEQ ID NO: 18127 - DNA, 80 bp, synthetic construct
  misc_feature 1..80: note = Synthetic: >JQ065047_14-cand-2730-2809
  source 1..80: mol_type = other DNA
tatagtggtgttgttatattttaaacctcttttgtttattgtcactactagtgtggttacatttatcaatagcatggagt

SEQ ID NO: 18128 - DNA, 80 bp, synthetic construct
  misc_feature 1..80: note = Synthetic: >JQ065047_14-cand-2810-2889
  source 1..80: mol_type = other DNA
tttacattccattctatggtacttatagccttacttatactaatacatatataacagtaataattattaatttgatgtat

SEQ ID NO: 18129 - DNA, 80 bp, synthetic construct
  misc_feature 1..80: note = Synthetic: >JQ065047_14-cand-2890-2969
  source 1..80: mol_type = other DNA
aaatctttttgttttgttaaacaccttgtttctgggtgcagcaaaacaggctgtagtatatgtgctaaaaagtctgtgta

SEQ ID NO: 18130 - DNA, 80 bp, synthetic construct
  misc_feature 1..80: note = Synthetic: >JQ065047_14-cand-2970-3049
  source 1..80: mol_type = other DNA
tactgttcttaatgtagaaacagttatacagggtagaaaatttgtatcacaggttagtactaatggtggtacaaagttct

SEQ ID NO: 18131 - DNA, 80 bp, synthetic construct
  misc_feature 1..80: note = Synthetic: >JQ065047_14-cand-3050-3129
  source 1..80: mol_type = other DNA
gtgaaaaacataacttttattgtttaaattgtgacaatcctatggatgatggtacttttataccagttgaagcggttgaa

SEQ ID NO: 18132 - DNA, 80 bp, synthetic construct
  misc_feature 1..80: note = Synthetic: >JQ065047_14-cand-3130-3209
  source 1..80: mol_type = other DNA
agtctgtctaaagccactaatacacatgtcaaaccaacaagtgtggcatatgctatgtctagagacataacatgtaatgg

SEQ ID NO: 18133 - DNA, 80 bp, synthetic construct
  misc_feature 1..80: note = Synthetic: >JQ065047_14-cand-3210-3289
  source 1..80: mol_type = other DNA
tgatgtctttatggccaatgttactattaatggtaagaacatagtgacttgtaataagtacacagatgttcgtactgttg

SEQ ID NO: 18134 - DNA, 80 bp, synthetic construct
  misc_feature 1..80: note = Synthetic: >JQ065047_14-cand-3280-3359
  source 1..80: mol_type = other DNA
cgtactgttgatcagttaaagaaaccagacttgctatctaactacccgcaagacgtagttattgcatgtgactttgagaa

SEQ ID NO: 18135 - DNA, 80 bp, synthetic construct
  misc_feature 1..80: note = Synthetic: >JQ065047_14-cand-3360-3439
  source 1..80: mol_type = other DNA
tgtagcagctgttaacttacctaaccaaatggctgcaccaatgtcaatggtattgcggcggtttgttctaattatagatc

SEQ ID NO: 18136 - DNA, 80 bp, synthetic construct
  misc_feature 1..80: note = Synthetic: >JQ065047_14-cand-3440-3519
  source 1..80: mol_type = other DNA
aacagcacacaaaaccggttaatagttatgaacaagtaaagaaccttttgaatgagttcttttcttttcaagatttaaca

SEQ ID NO: 18137 - DNA, 80 bp, synthetic construct
  misc_feature 1..80: note = Synthetic: >JQ065047_14-cand-3520-3599
  source 1..80: mol_type = other DNA
caaacaggtgatttgattgcagatgttaaaaatgcaactaataatcaagtctctgatacagctatctgtgctgctaaatt

SEQ ID NO: 18138 - DNA, 80 bp, synthetic construct
  misc_feature 1..80: note = Synthetic: >JQ065047_14-cand-3600-3679
  source 1..80: mol_type = other DNA
tgctgttgataatggcttggatttaaccatggataaccctaataatacagtaccacattatgcatttgatttcaatagcc

SEQ ID NO: 18139 - DNA, 80 bp, synthetic construct
  misc_feature 1..80: note = Synthetic: >JQ065047_14-cand-3680-3759
  source 1..80: mol_type = other DNA
taccatcagaggataaaagcactctaatggattttggtattggaagttcagtgttaaaaggtactagttacaacattatc

SEQ ID NO: 18140 - DNA, 80 bp, synthetic construct
  misc_feature 1..80: note = Synthetic: >JQ065047_14-cand-3760-3839
  source 1..80: mol_type = other DNA
ttaccatacaatttacttgttaaattgtctgttaagactataattaaattaaagagtgctgctatgaagaatggtgtgaa

SEQ ID NO: 18141 - DNA, 80 bp, synthetic construct
  misc_feature 1..80: note = Synthetic: >JQ065047_14-cand-3840-3919
  source 1..80: mol_type = other DNA
acttttagtcacaccttctacgcgtgtaatacgcggaacacttagtgtcattccttttaatattaaaactggtggtaaca

SEQ ID NO: 18142 - DNA, 80 bp, synthetic construct
  misc_feature 1..80: note = Synthetic: >JQ065047_14-cand-3920-3999
  source 1..80: mol_type = other DNA
aagtttacaccacttttctgtcactcttaaaattatttctactagttagtgtagttgcatttttagcatcgtgttttgtt

SEQ ID NO: 18143 - DNA, 80 bp, synthetic construct
  misc_feature 1..80: note = Synthetic: >JQ065047_14-cand-4000-4079
  source 1..80: mol_type = other DNA
acatggctttttacactaacaccaccaacaacaatgtcacatgttgaagcctctaattttagagttattagaaacggtgt

SEQ ID NO: 18144 - DNA, 80 bp, synthetic construct
  misc_feature 1..80: note = Synthetic: >JQ065047_14-cand-4080-4159
  source 1..80: mol_type = other DNA
cattgactctataagagcagatgattattgtttttctaataaatacgtggcatttgattcatttatatcacggccttata

SEQ ID NO: 18145 - DNA, 80 bp, synthetic construct
  misc_feature 1..80: note = Synthetic: >JQ065047_14-cand-4160-4239
  source 1..80: mol_type = other DNA
taaatttccctagttgtcctgtagtgatagccaatgtctatgtggcaggtgattcagtaccaggcataccaggacatttg

SEQ ID NO: 18146 - DNA, 80 bp, synthetic construct
  misc_feature 1..80: note = Synthetic: >JQ065047_14-cand-4240-4319
  source 1..80: mol_type = other DNA
tttcaccgtgataatataattatgcatgcgtatgatctacataaatatacgttacagcatctctttgaaacacctgcttc

SEQ ID NO: 18147 - DNA, 80 bp, synthetic construct
  misc_feature 1..80: note = Synthetic: >JQ065047_2-cand-40-119
  source 1..80: mol_type = other DNA
tgtaacaatggttctaccatctgtgctaagcatgtgtcagaatacaacatgtttgtccagtcagtaaatctgatggcgaa

SEQ ID NO: 18148 - DNA, 80 bp, synthetic construct
  misc_feature 1..80: note = Synthetic: >JQ065047_3-cand-0-79
  source 1..80: mol_type = other DNA
gaaacattttttgttactaagcaatgtacagaaaatgtttttcgtgcagaagagcagtgctataatatgttacccaagag

SEQ ID NO: 18149 - DNA, 80 bp, synthetic construct
  misc_feature 1..80: note = Synthetic: >JQ065047_3-cand-90-169
  source 1..80: mol_type = other DNA
acagatgataaattttcttgtgtagcatatcatgattttttcaagtttgatggcgtcaacaatgttgtacgtcgtcactt

SEQ ID NO: 18150 - DNA, 80 bp, synthetic construct
  misc_feature 1..80: note = Synthetic: >JQ065047_4-cand-0-79
  source 1..80: mol_type = other DNA
ttatgactccaagctcattaaactctcttgggagcacaataagaaagtaccacccattactaagaatcatatcttcactg

SEQ ID NO: 18151 - DNA, 80 bp, synthetic construct
  misc_feature 1..80: note = Synthetic: >JQ065047_4-cand-100-179
  source 1..80: mol_type = other DNA
ggaaagacacaggtcggagattatattctagttaagtgtgatggtgactcttattcatacaaggccacttcaacctacaa

SEQ ID NO: 18152 - DNA, 80 bp, synthetic construct
  misc_feature 1..80: note = Synthetic: >JQ065047_5-cand-0-79
  source 1..80: mol_type = other DNA
agttcaaactgagtatattcaaatctcaacagataatatagtaatagactgccagcggtatgtctgtaatggcaacccca

SEQ ID NO: 18153 - DNA, 80 bp, synthetic construct
  misc_feature 1..80: note = Synthetic: >JQ065047_5-cand-140-219
  source 1..80: mol_type = other DNA
accaaaaggcaagacttgagtctttggagttgagcacaatgcttgcttattccccaaacactctccagcttgccaatgta

SEQ ID NO: 18154 - DNA, 80 bp, synthetic construct
  misc_feature 1..80: note = Synthetic: >JQ065047_6-cand-0-79
  source 1..80: mol_type = other DNA
cacagtactcatggacgaacgctatggaacttcttatagtgagttttgtcaatatgacaatgctgtgttcttatcaccct

SEQ ID NO: 18155 - DNA, 80 bp, synthetic construct
  misc_feature 1..80: note = Synthetic: >JQ065047_6-cand-100-179
  source 1..80: mol_type = other DNA
ccaattgtcataacatttctgactaagaatggtgtacgagtgtacgactgtacactttacatctattggagatacaatgg

SEQ ID NO: 18156 - DNA, 80 bp, synthetic construct
  misc_feature 1..80: note = Synthetic: >JQ065047_6-cand-200-279
  source 1..80: mol_type = other DNA
acacactatactctcagcagcgtagtgttgtaaacttcaaaccattgacaaaaatggaagcagattttttgtcaatgact

SEQ ID NO: 18157 - DNA, 80 bp, synthetic construct
  misc_feature 1..80: note = Synthetic: >JQ065047_6-cand-300-379
  source 1..80: mol_type = other DNA
ctatgacctgacaaatctaggcgttgaacacattttgtatggcgacacttctaaaacaattttaggaggttgccatgcac

SEQ ID NO: 18158 - DNA, 80 bp, synthetic construct
  misc_feature 1..80: note = Synthetic: >JQ065047_6-cand-390-469
  source 1..80: mol_type = other DNA
agtacactctgaatttagttcagattttgtcacacatcttttcaacccagtacagaacatgattgtaacagctgataatg

SEQ ID NO: 18159 - DNA, 80 bp, synthetic construct
  misc_feature 1..80: note = Synthetic: >JQ065047_6-cand-480-559
  source 1..80: mol_type = other DNA
aaatgtgtgttccgtggttgatcttacaatagataactacatagacattattaggcaagcccatagtgtctacgaaacaa

SEQ ID NO: 18160 - DNA, 80 bp, synthetic construct
  misc_feature 1..80: note = Synthetic: >JQ065047_7-cand-0-79
  source 1..80: mol_type = other DNA
tagtctaaatccttcttattatgcagaaacttttgatgaagcagcttcaaaagttctttcagaacttattaacactggga

SEQ ID NO: 18161 - DNA, 80 bp, synthetic construct
  misc_feature 1..80: note = Synthetic: >JQ065047_7-cand-100-179
  source 1..80: mol_type = other DNA
cgtaaggttgttggctatgaccacatttggaaaattcattggcagcgatcacctggttcatcagaaggctgttgtataac

SEQ ID NO: 18162 - DNA, 80 bp, synthetic construct
  misc_feature 1..80: note = Synthetic: >JQ065047_7-cand-190-269
  source 1..80: mol_type = other DNA
tgtctacctggtgaagcagtgtggcctatgtatctcagatctggtctaacctacaatatacctaattacaccaaatctta

SEQ ID NO: 18163 - DNA, 80 bp, synthetic construct
  misc_feature 1..80: note = Synthetic: >JQ065047_7-cand-280-359
  source 1..80: mol_type = other DNA
atgctaccctaccagtggcttataaagtcttatgtcaatctattcaacctcactcatcatgaaaaagaattcacactttg

SEQ ID NO: 18164 - DNA, 80 bp, synthetic construct
  misc_feature 1..80: note = Synthetic: >JQ065047_7-cand-370-449
  source 1..80: mol_type = other DNA
cttctaacaacaccagcaatgtggtttttagtggcactattagcaaaaccttccattattacctgtagacatcatactac

SEQ ID NO: 18165 - DNA, 80 bp, synthetic construct
  misc_feature 1..80: note = Synthetic: >JQ065047_7-cand-420-499
  source 1..80: mol_type = other DNA
ttccattattacctgtagacatcatactacagcatttgacacagacgagcaggcatacggtaccgaaatactagtagatc

SEQ ID NO: 18166 - DNA, 80 bp, synthetic construct
  misc_feature 1..80: note = Synthetic: >JQ065047_7-cand-510-589
  source 1..80: mol_type = other DNA
actcgtgcagagaatcaccctatggctaactaacactgcacgaaggttagtagcttctgattagatgtaaaaccaatcaa

SEQ ID NO: 18167 - DNA, 80 bp, synthetic construct
  misc_feature 1..80: note = Synthetic: >JQ065047_7-cand-600-679
  source 1..80: mol_type = other DNA
ttatggcaagctaaatgaagaaaccagaagatctgtattcaagagtagtgattgactcttgaattgtagcagatgcctcc

SEQ ID NO: 18168 - DNA, 80 bp, synthetic construct
  misc_feature 1..80: note = Synthetic: >JQ065047_7-cand-690-769
  source 1..80: mol_type = other DNA
cgtcacttagtttgtcttatttatgagtaatcattggggaatttaatttggacttaaattggatggggtagcaaaaaaaa

SEQ ID NO: 18169 - DNA, 80 bp, synthetic construct
  misc_feature 1..80: note = Synthetic: >JQ065047_8-cand-130-209
  source 1..80: mol_type = other DNA
cagtatgtaacaggcaatcaagttatctttagaggtcgcacgtatgttattaatactatgtatgaccttgataatcaaat

SEQ ID NO: 18170 - DNA, 80 bp, synthetic construct
  misc_feature 1..80: note = Synthetic: >JQ065047_8-cand-220-299
  source 1..80: mol_type = other DNA
aaaccacaaagctttcccatagttcttgaatgtacaaaacttaatgttttagaaaaacttcataacatgggatgggacac

SEQ ID NO: 18171 - DNA, 80 bp, synthetic construct
  misc_feature 1..80: note = Synthetic: >JQ065047_8-cand-310-389
  source 1..80: mol_type = other DNA
aagctccaaaataatgagctttatgtacgtaatgtcttctgtgctcaatccacttgtaccgatgctaatgataatcagag

SEQ ID NO: 18172 - DNA, 80 bp, synthetic construct
  misc_feature 1..80: note = Synthetic: >JQ065047_8-cand-400-479
  source 1..80: mol_type = other DNA
acattctatgtgtcacaatcaggtaataaaatattagttgctgtgacatctactaatgacaaccttagaactgtaactgt

SEQ ID NO: 18173 - DNA, 80 bp, synthetic construct
  misc_feature 1..80: note = Synthetic: >JQ065047_8-cand-490-569
  source 1..80: mol_type = other DNA
gatggttctaaagtagtcttaaatttagaacaacctatgcgctttgctcacatggttaatggtaaacacttaaacacata

SEQ ID NO: 18174 - DNA, 80 bp, synthetic construct
  misc_feature 1..80: note = Synthetic: >JQ065047_8-cand-580-659
  source 1..80: mol_type = other DNA
gtagccaatataaagactatttatagaggcatgataattggtcatatctcttctacagtgtctctacaatcgagtggaac

SEQ ID NO: 18175 - DNA, 80 bp, synthetic construct
  misc_feature 1..80: note = Synthetic: >JQ065047_8-cand-660-739
  source 1..80: mol_type = other DNA
gtctgtagaatatcaagaaaataattctctcttaacttatctagcgtttgctgttaatcctagagaggcttatctagcac

SEQ ID NO: 18176 - DNA, 80 bp, synthetic construct
  misc_feature 1..80: note = Synthetic: >JQ065047_8-cand-750-829
  source 1..80: mol_type = other DNA
tggtggcaaacctattcaaggagctgtacgtgttatagcacctcagggcgaagggtttgccgtaaccactaaaccacaac

SEQ ID NO: 18177 - DNA, 80 bp, synthetic construct
  misc_feature 1..80: note = Synthetic: >JQ065047_9-cand-0-79
  source 1..80: mol_type = other DNA
gtagtgtactctacagtggggaagagtactcaaccccaggtccagtctctagaggatgaaaaccgttcgagtactcgttc

SEQ ID NO: 18178 - DNA, 80 bp, synthetic construct
  misc_feature 1..80: note = Synthetic: >JQ065047_9-cand-220-299
  source 1..80: mol_type = other DNA
gcgtagaggacgaaactactattagctataaatatcttgtttcatgcttaggtatggttatgtcaactagcatagaaacc

SEQ ID NO: 18179 - DNA, 80 bp, synthetic construct
  misc_feature 1..80: note = Synthetic: >JQ065047_9-cand-310-389
  source 1..80: mol_type = other DNA
tgtttttgactaaacaagattccaagaaatatgtcaactcctggataggatttgatgttgaagcagcccatgctataaaa

SEQ ID NO: 18180 - DNA, 80 bp, synthetic construct
  misc_feature 1..80: note = Synthetic: >JQ065047_9-cand-400-479
  source 1..80: mol_type = other DNA
gtaccaatctaccattacaattggggtttagcactggacataatttttctgtgataccagagggtttatgggttactgag

SEQ ID NO: 18181 - DNA, 80 bp, synthetic construct
  misc_feature 1..80: note = Synthetic: >JQ065047_9-cand-490-569
  source 1..80: mol_type = other DNA
gcaacgatctcgtagcagcaaaaatcccacctggtgtacagttttctcatcttaagaaggacatgaaaaatggcaaacca

SEQ ID NO: 18182 - DNA, 80 bp, synthetic construct
  misc_feature 1..80: note = Synthetic: >JQ065047_9-cand-580-659
  source 1..80: mol_type = other DNA
taaggccaaaacttgtccaattaatagcagaaacaactatggattctgactttgtaacatttgttacttgggcacatcaa

SEQ ID NO: 18183 - DNA, 80 bp, synthetic construct
  misc_feature 1..80: note = Synthetic: >JQ065047_9-cand-670-749
  source 1..80: mol_type = other DNA
ccactatgcgttactttgtaaaaatagggcaagaacagaagtgtgattgcgggcgtcgtgctaactttaccactaaagaa

SEQ ID NO: 18184 - DNA, 80 bp, synthetic construct
  misc_feature 1..80: note = Synthetic: >JQ065047_9-cand-760-839
  source 1..80: mol_type = other DNA
atggctgcaaaatccattatcatggctttgactatgtatataacccatttttagtagatgttgctaattggggttatact

SEQ ID NO: 18185 - DNA, 80 bp, synthetic construct
  misc_feature 1..80: note = Synthetic: >JQ065048_1-cand-40-119
  source 1..80: mol_type = other DNA
agtagctaattgctacctctcagtttatgagggtggttgtatatcagcacagaatgtagttgttaataatttggataaat

SEQ ID NO: 18186 - DNA, 80 bp, synthetic construct
  misc_feature 1..80: note = Synthetic: >JQ065048_10-cand-100-179
  source 1..80: mol_type = other DNA
acctactaacccccaaaagcaacctgacaaaccagttgcaactatagttgacaacggggactctcaggttataaattggg

SEQ ID NO: 18187 - DNA, 80 bp, synthetic construct
  misc_feature 1..80: note = Synthetic: >JQ065048_10-cand-200-279
  source 1..80: mol_type = other DNA
ctagaatccttctcatgagccttgtcatagatggagatccactacaggtggcagatgttcttagacaactgtcgctcatt

SEQ ID NO: 18188 - DNA, 80 bp, synthetic construct
  misc_feature 1..80: note = Synthetic: >JQ065048_10-cand-300-379
  source 1..80: mol_type = other DNA
ttgtaatctccggctacactgggttgaaggagtgccttgcacactttctttttgtgagttgtgctatgacttccttcagc

SEQ ID NO: 18189 - DNA, 80 bp, synthetic construct
  misc_feature 1..80: note = Synthetic: >JQ065048_10-cand-400-479
  source 1..80: mol_type = other DNA
ggttttagtgattctagtaccagtccagattttgttgattctcaataatcttaacacagttgcctatattgctggcacta

SEQ ID NO: 18190 - DNA, 80 bp, synthetic construct
  misc_feature 1..80: note = Synthetic: >JQ065048_11-cand-0-79
  source 1..80: mol_type = other DNA
tgactttgtcatctgttccacgtgcattttatgtggcaacaccaagccacacatatcattattcgctccgtaaaacattc

SEQ ID NO: 18191 - DNA, 80 bp, synthetic construct
  misc_feature 1..80: note = Synthetic: >JQ065048_11-cand-100-179
  source 1..80: mol_type = other DNA
cacagccacctacatttatttggtggagaaaattagcaaggctgatctaagctcagtcacaacaggtaataacgctgctt

SEQ ID NO: 18192 - DNA, 80 bp, synthetic construct
  misc_feature 1..80: note = Synthetic: >JQ065048_11-cand-200-279
  source 1..80: mol_type = other DNA
gtaagtgtgctcagtatattaaagtatttaatactaatatacatggacactccaacacatcacttctcactattgatgac

SEQ ID NO: 18193 - DNA, 80 bp, synthetic construct
  misc_feature 1..80: note = Synthetic: >JQ065048_11-cand-410-489
  source 1..80: mol_type = other DNA
tcaaagccgataagtttcttattaatccgccttcaaaggttgagttttatgatgactaaacaccaataaccaaaatggct

SEQ ID NO: 18194 - DNA, 80 bp, synthetic construct
  misc_feature 1..80: note = Synthetic: >JQ065048_12-cand-0-79
  source 1..80: mol_type = other DNA
cactattgttgagtcctagccctataacttcacatattgcatttgggctctcttactatatagttcagcctttggatgat

SEQ ID NO: 18195 - DNA, 80 bp, synthetic construct
  misc_feature 1..80: note = Synthetic: >JQ065048_12-cand-90-169
  source 1..80: mol_type = other DNA
taccaatatatgtggtaagactctttgtcttctattgtattgggcttataataaccatgcgctatggagtcttttggttt

SEQ ID NO: 18196 - DNA, 80 bp, synthetic construct
  misc_feature 1..80: note = Synthetic: >JQ065048_12-cand-180-259
  source 1..80: mol_type = other DNA
tgactggtataccagttggtacttataagtttatggtttctcgcgatgagcttaaatatatgatggctactcgtatgaaa

SEQ ID NO: 18197 - DNA, 80 bp, synthetic construct
  misc_feature 1..80: note = Synthetic: >JQ065048_12-cand-270-349
  source 1..80: mol_type = other DNA
atgcaattgaggtaatttggactaattttaaattgttgggtgtgggcggcaagcgtgaaattgttgtttctacagtccaa

SEQ ID NO: 18198 - DNA, 80 bp, synthetic construct
  misc_feature 1..80: note = Synthetic: >JQ065048_12-cand-360-439
  source 1..80: mol_type = other DNA
tagatgctaaagctactgctgttttggtggctaacatgttagataaagttggagctctcaataaacatgaagtttctaag

SEQ ID NO: 18199 - DNA, 80 bp, synthetic construct
  misc_feature 1..80: note = Synthetic: >JQ065048_12-cand-450-529
  source 1..80: mol_type = other DNA
cccatcataatgccactttgaaggctgaaagttatgaagaagctgaaacaaatttggtgcagttgatggcttatcttatt

SEQ ID NO: 18200 - DNA, 80 bp, synthetic construct
  misc_feature 1..80: note = Synthetic: >JQ065048_13-cand-0-79
  source 1..80: mol_type = other DNA
agtataatggttattatgttactccgcgtaatatgtatcaaccacgtccagctactacagctgactttgtgcaaatacaa

SEQ ID NO: 18201 - DNA, 80 bp, synthetic construct
  misc_feature 1..80: note = Synthetic: >JQ065048_13-cand-90-169
  source 1..80: mol_type = other DNA
ttaccctctataacattacttacaataatatatctttggtcataccagactttgtggataccaacaaaactattgaagat

SEQ ID NO: 18202 - DNA, 80 bp, synthetic construct
  misc_feature 1..80: note = Synthetic: >JQ065048_13-cand-180-259
  source 1..80: mol_type = other DNA
caatacctaataatactgcgcctagtttagaaatagccagtcttaatctgactgtactaaacctgacgtcagagctagaa

SEQ ID NO: 18203 - DNA, 80 bp, synthetic construct
  misc_feature 1..80: note = Synthetic: >JQ065048_13-cand-230-309
  source 1..80: mol_type = other DNA
actgtactaaacctgacgtcagagctagaacaattaaaagcctccactggcaattttactcaaatttctcaggaaataca

SEQ ID NO: 18204 - DNA, 80 bp, synthetic construct
  misc_feature 1..80: note = Synthetic: >JQ065048_13-cand-320-399
  source 1..80: mol_type = other DNA
aataaactcaatgacactctagttgacttagagtggctcaacagagtagaaacttatgttaaatggccatggtgggtgtg

SEQ ID NO: 18205 - DNA, 80 bp, synthetic construct
  misc_feature 1..80: note = Synthetic: >JQ065048_13-cand-410-489
  source 1..80: mol_type = other DNA
tttttagccatttgtacttttataataattgtcgtaacaatcttcctatgcacaggttgctgtggtggatgttttggctg

SEQ ID NO: 18206 - DNA, 80 bp, synthetic construct
  misc_feature 1..80: note = Synthetic: >JQ065048_13-cand-500-579
  source 1..80: mol_type = other DNA
tgctgtggtttgtttagcagagttaaacaccatgagttttcgcacttacctgtagaagaacaagatggctcaataccaat

SEQ ID NO: 18207 - DNA, 80 bp, synthetic construct
  misc_feature 1..80: note = Synthetic: >JQ065048_13-cand-590-669
  source 1..80: mol_type = other DNA
aaagttaattaatgtcctcttgggacgttgtaatcccaggctcggttgttatagctttcttaatagttgcttgttgcatt

SEQ ID NO: 18208 - DNA, 80 bp, synthetic construct
  misc_feature 1..80: note = Synthetic: >JQ065048_13-cand-680-759
  source 1..80: mol_type = other DNA
tattcattaaaacgtgtttagctatatttgattgctgttcaagatcttgtacgtgtgtactcgacaccgtaaaaccagtt

SEQ ID NO: 18209 - DNA, 80 bp, synthetic construct
  misc_feature 1..80: note = Synthetic: >JQ065048_13-cand-770-849
  source 1..80: mol_type = other DNA
cgtataatcttgttccgagatttacgcctccttataacccttctgattacgtcatagtaaatcagtttcccagaaacagt

SEQ ID NO: 18210 - DNA, 80 bp, synthetic construct
  misc_feature 1..80: note = Synthetic: >JQ065048_13-cand-860-939
  source 1..80: mol_type = other DNA
gactactctgagtggcagcttattgtttttattgttattatttgggctcttggtatcatactccagggcgggtatgccac

SEQ ID NO: 18211 - DNA, 80 bp, synthetic construct
  misc_feature 1..80: note = Synthetic: >JQ065048_14-cand-0-79
  source 1..80: mol_type = other DNA
gcgttcaagctgaggttgaccgtgcgagtggtactcaaacgaccaacctcttcaagctctgtaaaaatgattatgaaggt

SEQ ID NO: 18212 - DNA, 80 bp, synthetic construct
  misc_feature 1..80: note = Synthetic: >JQ065048_14-cand-90-169
  source 1..80: mol_type = other DNA
actacgctttaaattggaatgatttgggtccgaattataagtgtggtgatgacttggctaaaatttttggcatagagctg

SEQ ID NO: 18213 - DNA, 80 bp, synthetic construct
  misc_feature 1..80: note = Synthetic: >JQ065048_14-cand-140-219
  source 1..80: mol_type = other DNA
gacttggctaaaatttttggcatagagctgggtgccaatattagttataaatatttggtctcgatgctagggtttttacc

SEQ ID NO: 18214 - DNA, 80 bp, synthetic construct
  misc_feature 1..80: note = Synthetic: >JQ065048_14-cand-230-309
  source 1..80: mol_type = other DNA
atacctacataccacaacttcttcttaactaaagatgaagccaagcagtatgtgcaatcatgggtaggttttgacgttga

SEQ ID NO: 18215 - DNA, 80 bp, synthetic construct
  misc_feature 1..80: note = Synthetic: >JQ065048_14-cand-320-399
  source 1..80: mol_type = other DNA
gcagttaaacctaacgttggcactaacctaccgctacaattgggcttctctaatggcattaacttctcagttaagccaga

SEQ ID NO: 18216 - DNA, 80 bp, synthetic construct
  misc_feature 1..80: note = Synthetic: >JQ065048_14-cand-410-489
  source 1..80: mol_type = other DNA
gttacagaaacaggtactacttatggtgaagtgcctgctaaaatacctccaggtgaacaattttctcatcttcgtaagga

SEQ ID NO: 18217 - DNA, 80 bp, synthetic construct
  misc_feature 1..80: note = Synthetic: >JQ065048_14-cand-480-559
  source 1..80: mol_type = other DNA
ttcgtaaggatatgaagcatggggaatcctggagtgttgtacgtaatcgtattgtagttatgctctctaagcttctgcgt

SEQ ID NO: 18218 - DNA, 80 bp, synthetic construct
  misc_feature 1..80: note = Synthetic: >JQ065048_14-cand-570-649
  source 1..80: mol_type = other DNA
atattgtctttgtcacttgggcacatcagttagaactgactacaatgcgttattttgtgcgcattggtcccgaccgtaca

SEQ ID NO: 18219 - DNA, 80 bp, synthetic construct
  misc_feature 1..80: note = Synthetic: >JQ065048_14-cand-660-739
  source 1..80: mol_type = other DNA
gacgtcgcgctgtcttttccacttacaatgcttctcgtataggttgtaagatacattgtgatggtttagactattgttat

SEQ ID NO: 18220 - DNA, 80 bp, synthetic construct
  misc_feature 1..80: note = Synthetic: >JQ065048_14-cand-750-829
  source 1..80: mol_type = other DNA
ttattgattgtgcaacttggggttattctggtagtcttagttctaaccatgatgcggtatgcacgtaccactcaaatgct

SEQ ID NO: 18221 - DNA, 80 bp, synthetic construct
  misc_feature 1..80: note = Synthetic: >JQ065048_14-cand-840-919
  source 1..80: mol_type = other DNA
cttctgatgcgcaaatgaccatatgtttagctatacaccacttattctcggtcgttgactgggatgtcatttatcctact

SEQ ID NO: 18222 - DNA, 80 bp, synthetic construct
  misc_feature 1..80: note = Synthetic: >JQ065048_14-cand-930-1009
  source 1..80: mol_type = other DNA
aagatatgttgaacaaagcctgtaggttggtccaggccaactacatgaggattttgttaaccaccatgaatactagtgtt

SEQ ID NO: 18223 - DNA, 80 bp, synthetic construct
  misc_feature 1..80: note = Synthetic: >JQ065048_15-cand-0-79
  source 1..80: mol_type = other DNA
tccaacacatgttgcagagtatgatgtatttgttaaggcctatacattaatgtcacgtgtgggttttaatgtctacgtac

SEQ ID NO: 18224 - DNA, 80 bp, synthetic construct
  misc_feature 1..80: note = Synthetic: >JQ065048_15-cand-80-159
  source 1..80: mol_type = other DNA
ctcgtaacattaacttgtataactgttgggtaaaattttctagtttacaaactttggaaaatttggcctacaacgtgtat

SEQ ID NO: 18225 - DNA, 80 bp, synthetic construct
  misc_feature 1..80: note = Synthetic: >JQ065048_15-cand-170-249
  source 1..80: mol_type = other DNA
acaatgctaatgtacgtggtgagttagatgtagttataagtaataatgtagtttcagctaaggttgatggacgcattatt

SEQ ID NO: 18226 - DNA, 80 bp, synthetic construct
  misc_feature 1..80: note = Synthetic: >JQ065048_15-cand-260-339
  source 1..80: mol_type = other DNA
aaaacacaactatattgcctgttagtgtagcgtttgaacattatactaaccgtaatataagttctattcccacagcatct

SEQ ID NO: 18227 - DNA, 80 bp, synthetic construct
  misc_feature 1..80: note = Synthetic: >JQ065048_15-cand-340-419
  source 1..80: mol_type = other DNA
ctactcacaggtttaggtgttaatacaactgtaaattttacagtctggttgaatggtgatacactattctctcaaacagt

SEQ ID NO: 18228 - DNA, 80 bp, synthetic construct
  misc_feature 1..80: note = Synthetic: >JQ065048_15-cand-420-499
  source 1..80: mol_type = other DNA
gaatgtttcaacatatactgatgttattaataatgatgtttgtcttcttgatgagcgttataaatcgacgttgtctgact

SEQ ID NO: 18229 - DNA, 80 bp, synthetic construct
  misc_feature 1..80: note = Synthetic: >JQ065048_15-cand-500-579
  source 1..80: mol_type = other DNA
ttttaaaactagacaacgcagtgtttatatcacctactcagtataagaaatatggggccacccctatttcacagctgcag

SEQ ID NO: 18230 - DNA, 80 bp, synthetic construct
  misc_feature 1..80: note = Synthetic: >JQ065048_15-cand-590-669
  source 1..80: mol_type = other DNA
atcctgtgtatggtgatctcatatatctgtatgtgcggcgcgatggtaaaatagtgcaacccagcgttgattattatacg

SEQ ID NO: 18231 - DNA, 80 bp, synthetic construct
  misc_feature 1..80: note = Synthetic: >JQ065048_15-cand-680-759
  source 1..80: mol_type = other DNA
ctttgaaagactttgtgccacgcactactatggaagtagattttatgtctctcactcctcaggagtttgtacataagtat

SEQ ID NO: 18232 - DNA, 80 bp, synthetic construct
  misc_feature 1..80: note = Synthetic: >JQ065048_15-cand-770-849
  source 1..80: mol_type = other DNA
atttaggtatagaccacatattgtatggtgatgtcactacacgtgttattggtggctgccatgcacttatttcactttat

SEQ ID NO: 18233 - DNA, 80 bp, synthetic construct
  misc_feature 1..80: note = Synthetic: >JQ065048_15-cand-860-939
  source 1..80: mol_type = other DNA
tgaatgttgacagtgttgtagcacatgcacagccagtccagaatgccataataatagcctcagatggtaaatctaaggaa

SEQ ID NO: 18234 - DNA, 80 bp, synthetic construct
  misc_feature 1..80: note = Synthetic: >JQ065048_15-cand-950-1029
  source 1..80: mol_type = other DNA
ttgttgatcttactatagatgattatattgatatcataaagcgcgctcatagtttgtatcaaacacaatctaaagtgttt

SEQ ID NO: 18235 - DNA, 80 bp, synthetic construct
  misc_feature 1..80: note = Synthetic: >JQ065048_16-cand-0-79
  source 1..80: mol_type = other DNA
tagtatggcgaataaagcacgtcctaaagggatcttggtaatccctgagctatcgaataatagctctcttcttttattgt

SEQ ID NO: 18236 - DNA, 80 bp, synthetic construct
  misc_feature 1..80: note = Synthetic: >JQ065048_16-cand-90-169
  source 1..80: mol_type = other DNA
taaaaatggccgtagtctaactgatcctactgccatacagttcctaggcaattataaactgaactttcgttctgctaggc

SEQ ID NO: 18237 - DNA, 80 bp, synthetic construct
  misc_feature 1..80: note = Synthetic: >JQ065048_16-cand-280-359
  source 1..80: mol_type = other DNA
tctgacactaagacttctttgattgctaaagctaaacaattaccagaattgttggatgttccggctattagggcttgtgt

SEQ ID NO: 18238 - DNA, 80 bp, synthetic construct
  misc_feature 1..80: note = Synthetic: >JQ065048_16-cand-370-449
  source 1..80: mol_type = other DNA
aatgcccgcatctccaccttagcctcacttgctactttttatagtgtggttaatgttggtgagcaggagttgtattcact

SEQ ID NO: 18239 - DNA, 80 bp, synthetic construct
  misc_feature 1..80: note = Synthetic: >JQ065048_16-cand-460-539
  source 1..80: mol_type = other DNA
atgatgttgcagcgtgcttacaaatataatctgggtgatgcctttgcttatatacgtaagctaaattgtgtccaaactga

SEQ ID NO: 18240 - DNA, 80 bp, synthetic construct
  misc_feature 1..80: note = Synthetic: >JQ065048_16-cand-540-619
  source 1..80: mol_type = other DNA
tgattttttgaagttgggtgtgtcagcttttgatgacgagttttcgactcgccttaaaaaggctgctactattgatggtc

SEQ ID NO: 18241 - DNA, 80 bp, synthetic construct
  misc_feature 1..80: note = Synthetic: >JQ065048_16-cand-630-709
  source 1..80: mol_type = other DNA
gattggagacttagttatgtggaagtgtgccacagctaaacgtgatgttggtggcttgactcacttttctggtcgaacaa

SEQ ID NO: 18242 - DNA, 80 bp, synthetic construct
  misc_feature 1..80: note = Synthetic: >JQ065048_16-cand-720-799
  source 1..80: mol_type = other DNA
tgttgagactgttatacaagagtctataacactagttccaatggacttgcctaaagtgtctgattcatattcaggtgcgg

SEQ ID NO: 18243 - DNA, 80 bp, synthetic construct
  misc_feature 1..80: note = Synthetic: >JQ065048_16-cand-810-889
  source 1..80: mol_type = other DNA
ccatggatttacctatttgaaggttaaggctgatatacctttttacctacccatcgtagggtcaaaggttttattatctg

SEQ ID NO: 18244 - DNA, 80 bp, synthetic construct
  misc_feature 1..80: note = Synthetic: >JQ065048_16-cand-900-979
  source 1..80: mol_type = other DNA
atctggtacacctatggctcccactagggttgtttttcatactgaacctgatgcagactttaaattgtttattgcagcac

SEQ ID NO: 18245 - DNA, 80 bp, synthetic construct
  misc_feature 1..80: note = Synthetic: >JQ065048_16-cand-980-1059
  source 1..80: mol_type = other DNA
agacactcttgaatgatgctgtggtagattgggacaatggttgtgttgttgatgattatacaacagtaacaataggtgtc

SEQ ID NO: 18246 - DNA, 80 bp, synthetic construct
  misc_feature 1..80: note = Synthetic: >JQ065048_16-cand-1070-1149
  source 1..80: mol_type = other DNA
gggacattgttgtcactcaggaatccttttttgagcgatttccaaaactaaagcgtgcttataccgcttttagggaatct

SEQ ID NO: 18247 - DNA, 80 bp, synthetic construct
  misc_feature 1..80: note = Synthetic: >JQ065048_17-cand-0-79
  source 1..80: mol_type = other DNA
gtttgctgatatggttgacgtaatggtcaacatatccgccactgaaatgcagtctatcttttactgcataaccccttttg

SEQ ID NO: 18248 - DNA, 80 bp, synthetic construct
  misc_feature 1..80: note = Synthetic: >JQ065048_17-cand-70-149
  source 1..80: mol_type = other DNA
accccttttgagcaggttaaatgttcacagaaacaaaccactctttctgatgggttctattccacatctgccattgaagt

SEQ ID NO: 18249 - DNA, 80 bp, synthetic construct
  misc_feature 1..80: note = Synthetic: >JQ065048_17-cand-150-229
  source 1..80: mol_type = other DNA
cctacagcgccagcgcacatttgtagggttaccgatggctattaacattactacgcttaattttgctattagttatttga

SEQ ID NO: 18250 - DNA, 80 bp, synthetic construct
  misc_feature 1..80: note = Synthetic: >JQ065048_17-cand-230-309
  source 1..80: mol_type = other DNA
ataccaaggctaatcctagtttaggtgcaccacaggaagtcaatcttaccataaatgggtttgcagatcaattctgtgtt

SEQ ID NO: 18251 - DNA, 80 bp, synthetic construct
  misc_feature 1..80: note = Synthetic: >JQ065048_17-cand-310-389
  source 1..80: mol_type = other DNA
acaacctcccagtttatggttactcttaatgtgacctgtctcgttcataataatactagtataataccctgtccacaggc

SEQ ID NO: 18252 - DNA, 80 bp, synthetic construct
  misc_feature 1..80: note = Synthetic: >JQ065048_17-cand-370-449
  source 1..80: mol_type = other DNA
ataataccctgtccacaggcttacacggcagaaatctcaccgggggattgcccatttaattttttggatgttaataacta

SEQ ID NO: 18253 - DNA, 80 bp, synthetic construct
  misc_feature 1..80: note = Synthetic: >JQ065048_17-cand-450-529
  source 1..80: mol_type = other DNA
tttaatgtttgacagcatttgcttttcaccttctcccagtggtgacagctgtcagatggttattaataaagtctgggcca

SEQ ID NO: 18254 - DNA, 80 bp, synthetic construct
  misc_feature 1..80: note = Synthetic: >JQ065048_17-cand-530-609
  source 1..80: mol_type = other DNA
ataatcgcatacctatgagtagcgtttatgtctcctatgtctatggcaaccagatagtcggtgtacctcgacacgatctc

SEQ ID NO: 18255 - DNA, 80 bp, synthetic construct
  misc_feature 1..80: note = Synthetic: >JQ065048_17-cand-620-699
  source 1..80: mol_type = other DNA
atcatgtcgtgtttaatttgtgcacagactacaccatttatgggtataccggtactggtgttatacgtgaaactaacacc

SEQ ID NO: 18256 - DNA, 80 bp, synthetic construct
  misc_feature 1..80: note = Synthetic: >JQ065048_17-cand-700-779
  source 1..80: mol_type = other DNA
acatactttgccggttatgcctatgcatcaccagctggtcaactcgttgcctataaaaatcttactactggtgctattaa

SEQ ID NO: 18257 - DNA, 80 bp, synthetic construct
  misc_feature 1..80: note = Synthetic: >JQ065048_17-cand-780-859
  source 1..80: mol_type = other DNA
ttctataacaccatgtaagtttagtcaacaattagccgtgtataatgatacacctgtagcccttgtgtcagcggtgccct

SEQ ID NO: 18258 - DNA, 80 bp, synthetic construct
  misc_feature 1..80: note = Synthetic: >JQ065048_17-cand-870-949
  source 1..80: mol_type = other DNA
tgggtttaccaatgcaacctctatgggtacctttgttgtcaattcaaatgcaactaattgcaccattccagctcttactt

SEQ ID NO: 18259 - DNA, 80 bp, synthetic construct
  misc_feature 1..80: note = Synthetic: >JQ065048_17-cand-960-1039
  source 1..80: mol_type = other DNA
tggcatttgtgccaatggcgctccatatgtagtacctacaggtgaaggccaagaacctagtgttgtccccatttctacgg

SEQ ID NO: 18260 - DNA, 80 bp, synthetic construct
  misc_feature 1..80: note = Synthetic: >JQ065048_17-cand-1050-1129
  source 1..80: mol_type = other DNA
aatacctgtcaattttactgtagccatacagcctgagtatctacaggtttatactgagcaggttgttgtagactgtgcca

SEQ ID NO: 18261 - DNA, 80 bp, synthetic construct
  misc_feature 1..80: note = Synthetic: >JQ065048_17-cand-1140-1219
  source 1..80: mol_type = other DNA
caacggtaacccattgtgtaacaagttgttgttacaatacacttcagcttgcgacacaattgagcaggcgttgcaaatga

SEQ ID NO: 18262 - DNA, 80 bp, synthetic construct
  misc_feature 1..80: note = Synthetic: >JQ065048_17-cand-1230-1309
  source 1..80: mol_type = other DNA
agagtctagtgaagtctctaacatgctacacatttcaacgcaggctctggatttggctaacatctcaaattttgagggtt

SEQ ID NO: 18263 - DNA, 80 bp, synthetic construct
  misc_feature 1..80: note = Synthetic: >JQ065048_17-cand-1310-1389
  source 1..80: mol_type = other DNA
ataatatgtcctttgttttgcctgctgttaaacagggtaggtctgccttagaagacttgctatttactaaagtagttaca

SEQ ID NO: 18264 - DNA, 80 bp, synthetic construct
  misc_feature 1..80: note = Synthetic: >JQ065048_18-cand-0-79
  source 1..80: mol_type = other DNA
cttctacacagtcagtgcttactgaagctgatgtagagatgggtaccttaaccttaatcttacaggcatctgatgatgat

SEQ ID NO: 18265 - DNA, 80 bp, synthetic construct
  misc_feature 1..80: note = Synthetic: >JQ065048_18-cand-80-159
  source 1..80: mol_type = other DNA
gcactcattgtagatgatgatgatcagatgaatgtagatcaggatgatactgatgaaggctttgtaccttctattgaccc

SEQ ID NO: 18266 - DNA, 80 bp, synthetic construct
  misc_feature 1..80: note = Synthetic: >JQ065048_18-cand-160-239
  source 1..80: mol_type = other DNA
tcagccctactctaagcctttgttgccaacaatagtagagcagactgaatctgaagattctgattatgtcccggctgtta

SEQ ID NO: 18267 - DNA, 80 bp, synthetic construct
  misc_feature 1..80: note = Synthetic: >JQ065048_18-cand-240-319
  source 1..80: mol_type = other DNA
acataaaatcggacactgaaactgaagttgtcactgactctgacgagtggcaaccggttcctggtgatgagtctgataat

SEQ ID NO: 18268 - DNA, 80 bp, synthetic construct
  misc_feature 1..80: note = Synthetic: >JQ065048_18-cand-320-399
  source 1..80: mol_type = other DNA
gaaaatcaatgctcagttgatactgatgacgaaattgcgtctcagatggagaaacaacataatttagaccctgaagtcga

SEQ ID NO: 18269 - DNA, 80 bp, synthetic construct
  misc_feature 1..80: note = Synthetic: >JQ065048_18-cand-400-479
  source 1..80: mol_type = other DNA
agttgttactgattctgatgagcgccaaggtgatgagtctgatattcttgttgaagagactgatgactctagtgaaactg

SEQ ID NO: 18270 - DNA, 80 bp, synthetic construct
  misc_feature 1..80: note = Synthetic: >JQ065048_18-cand-480-559
  source 1..80: mol_type = other DNA
atacaggtgaaccacctgtaaccactgtcaatctaccaaatttgtcgacaccctatcctgttgttggcgtgccttcaaat

SEQ ID NO: 18271 - DNA, 80 bp, synthetic construct
  misc_feature 1..80: note = Synthetic: >JQ065048_18-cand-560-639
  source 1..80: mol_type = other DNA
actacaatatccatacatgtaggtgatcttacctctgtagtggttagagagaatgctattttagtgaaccctgcaaaccc

SEQ ID NO: 18272 - DNA, 80 bp, synthetic construct
  misc_feature 1..80: note = Synthetic: >JQ065048_18-cand-640-719
  source 1..80: mol_type = other DNA
acagttgactaatggagggggtgcagctaaagctatagctcaacttgcaggtcctgtgtatcagaggtactgcaatgaaa

SEQ ID NO: 18273 - DNA, 80 bp, synthetic construct
  misc_feature 1..80: note = Synthetic: >JQ065048_18-cand-710-789
  source 1..80: mol_type = other DNA
tgcaatgaaaatgcacctataaaaggtttatttgtgacgccaccatttgacgcagtcaagtatgggtactcgtgtattgc

SEQ ID NO: 18274 - DNA, 80 bp, synthetic construct
  misc_feature 1..80: note = Synthetic: >JQ065048_18-cand-790-869
  source 1..80: mol_type = other DNA
ccatattgtacctccaactggaaagtctggtgatgttaaatcaaagttgtaccaggcatacaaggatgtcttagttagtc

SEQ ID NO: 18275 - DNA, 80 bp, synthetic construct
  misc_feature 1..80: note = Synthetic: >JQ065048_18-cand-870-949
  source 1..80: mol_type = other DNA
ctggcaattatgttatacccatattaggcgtaggcatttatgggtgcaatgtagtagactcattgcaagcttttcgtcaa

SEQ ID NO: 18276 - DNA, 80 bp, synthetic construct
  misc_feature 1..80: note = Synthetic: >JQ065048_18-cand-950-1029
  source 1..80: mol_type = other DNA
gcgtgtcctaatgatattggctatgtaacgcttgtcactcttgactctaaccatgcagatgtttggtctaatctgaataa

SEQ ID NO: 18277 - DNA, 80 bp, synthetic construct
  misc_feature 1..80: note = Synthetic: >JQ065048_18-cand-1030-1109
  source 1..80: mol_type = other DNA
gtccattgttaaagttacattggattttgaccaggtgactaccaaacacatgagtttagatgaaattaaacaagctcgtc

SEQ ID NO: 18278 - DNA, 80 bp, synthetic construct
  misc_feature 1..80: note = Synthetic: >JQ065048_18-cand-1100-1179
  source 1..80: mol_type = other DNA
caagctcgtctatttgatggtgaaaaattcatcactcaggcaggtgactcaatttatttacaagtcactagtgcaactga

SEQ ID NO: 18279 - DNA, 80 bp, synthetic construct
  misc_feature 1..80: note = Synthetic: >JQ065048_18-cand-1180-1259
  source 1..80: mol_type = other DNA
acaggctgcatctaatttaggtttgactttagcacaatattttaggatgctacagtatacatcaattaagtggactgttg

SEQ ID NO: 18280 - DNA, 80 bp, synthetic construct
  misc_feature 1..80: note = Synthetic: >JQ065048_18-cand-1260-1339
  source 1..80: mol_type = other DNA
taaagaaaaatggtattatggttttgaaacaaagccataataattgttatgtagcatccgctatagcattcatgcagatg

SEQ ID NO: 18281 - DNA, 80 bp, synthetic construct
  misc_feature 1..80: note = Synthetic: >JQ065048_18-cand-1340-1419
  source 1..80: mol_type = other DNA
gttaattataaaccatcaggagctgttgcagatctatttaattcttttctcaatggcaatccatcagaatttgtggccta

SEQ ID NO: 18282 - DNA, 80 bp, synthetic construct
  misc_feature 1..80: note = Synthetic: >JQ065048_18-cand-1420-1499
  source 1..80: mol_type = other DNA
ttgttatgccgcctcaggtcaagtacctgggcagatgggtgatgcaatgtctgttttggatgtgttgtttaaagactttg

SEQ ID NO: 18283 - DNA, 80 bp, synthetic construct
  misc_feature 1..80: note = Synthetic: >JQ065048_18-cand-1500-1579
  source 1..80: mol_type = other DNA
tagttaggggcacaacggcttgttgtggcaatacatttcaacatgaaggtctaatgtatgcacttacagttgattctgac

SEQ ID NO: 18284 - DNA, 80 bp, synthetic construct
  misc_feature 1..80: note = Synthetic: >JQ065048_18-cand-1580-1659
  source 1..80: mol_type = other DNA
gttataactcattgttataagtgtgatgtcaaggcacatgctaaatttataacaccagctataattgcaggtgggtcttc

SEQ ID NO: 18285 - DNA, 80 bp, synthetic construct
  misc_feature 1..80: note = Synthetic: >JQ065048_18-cand-1660-1739
  source 1..80: mol_type = other DNA
tgacattatgtatgaaggtccagcaatctatcattctaagctgtcggctcactgggttgcgaatacaaaacatccaggga

SEQ ID NO: 18286 - DNA, 80 bp, synthetic construct
  misc_feature 1..80: note = Synthetic: >JQ065048_18-cand-1740-1819
  source 1..80: mol_type = other DNA
gtgactttacgtgtgaagctatttacgtatcgaatgtgcaagctgcagttcaaactgtaacgataccagtgacacctaat

SEQ ID NO: 18287 - DNA, 80 bp, synthetic construct
  misc_feature 1..80: note = Synthetic: >JQ065048_18-cand-1820-1899
  source 1..80: mol_type = other DNA
ccatatcaggtacttgtaaatgatgtagtaccacaggtggagttgcctaacgtaaatgaggtaacaccgcaggttgaggt

SEQ ID NO: 18288 - DNA, 80 bp, synthetic construct
  misc_feature 1..80: note = Synthetic: >JQ065048_18-cand-1900-1979
  source 1..80: mol_type = other DNA
gccagatgtagagtctaaaacattgagtgttaatgcgtctgatgatggttgtaacacctatgttttggaaaatcctaatg

SEQ ID NO: 18289 - DNA, 80 bp, synthetic construct
  misc_feature 1..80: note = Synthetic: >JQ065048_18-cand-1980-2059
  source 1..80: mol_type = other DNA
cgctagaactgctaacagtttggatagaaaaacccgttagtgttttagtaaagtcatggcaagttttaggcagagccttg

SEQ ID NO: 18290 - DNA, 80 bp, synthetic construct
  misc_feature 1..80: note = Synthetic: >JQ065048_18-cand-2060-2139
  source 1..80: mol_type = other DNA
ttcaaggctaatattgttctaaaattttctggcactgttgcaactcgcatatacaattatttgtgtaatattggtcttat

SEQ ID NO: 18291 - DNA, 80 bp, synthetic construct
  misc_feature 1..80: note = Synthetic: >JQ065048_18-cand-2140-2219
  source 1..80: mol_type = other DNA
acacaatcatgtaaagctttcagcgcagttggctgttaagtatattaaggaccgcacaccttatgttaaacggcttcgta

SEQ ID NO: 18292 - DNA, 80 bp, synthetic construct
  misc_feature 1..80: note = Synthetic: >JQ065048_18-cand-2220-2299
  source 1..80: mol_type = other DNA
aggttgcagtgtgggtgggtgcaaatgttgcacatggccttgctagtctttatccattttattggatatatccagcaaca

SEQ ID NO: 18293 - DNA, 80 bp, synthetic construct
  misc_feature 1..80: note = Synthetic: >JQ065048_18-cand-2300-2379
  source 1..80: mol_type = other DNA
cttatattaaaagcactgttctttgtaggtgtctttttattggctaaaactgggctaccttgtgatgtagtagaaccgcc

SEQ ID NO: 18294 - DNA, 80 bp, synthetic construct
  misc_feature 1..80: note = Synthetic: >JQ065048_18-cand-2380-2459
  source 1..80: mol_type = other DNA
atataatatggccacgtattgtgctgataagggcatattttgtcagccgtgtctaagtggttatgattctttacacttct

SEQ ID NO: 18295 - DNA, 80 bp, synthetic construct
  misc_feature 1..80: note = Synthetic: >JQ065048_18-cand-2460-2539
  source 1..80: mol_type = other DNA
atcagcatctaaaggtgcaacaaatacctgttaaggttgatttgttttggacatatgctgttcacattgtggcaactttt

SEQ ID NO: 18296 - DNA, 80 bp, synthetic construct
  misc_feature 1..80: note = Synthetic: >JQ065048_18-cand-2540-2619
  source 1..80: mol_type = other DNA
agtaacccctatttagtattgggtacactgttgttagtatttgtgctgaatatgtataatgttgaggtaatgttctttgg

SEQ ID NO: 18297 - DNA, 80 bp, synthetic construct
  misc_feature 1..80: note = Synthetic: >JQ065048_18-cand-2620-2699
  source 1..80: mol_type = other DNA
cgttatacagttgccatattggccagtagtttatatagtgttggctttattttacttgtataaagtctatatgtatttac

SEQ ID NO: 18298 - DNA, 80 bp, synthetic construct
  misc_feature 1..80: note = Synthetic: >JQ065048_18-cand-2700-2779
  source 1..80: mol_type = other DNA
aacacatctcagttggttgtaagaagcccacatgtaaattgtgtattaagaagaatattgccaagcgcgtcactgtagag

SEQ ID NO: 18299 - DNA, 80 bp, synthetic construct
  misc_feature 1..80: note = Synthetic: >JQ065048_18-cand-2780-2859
  source 1..80: mol_type = other DNA
gtggttttgcaggggcgtaaacattatactatggttaataccaatggtggcacaaatttctgtgataagcacgatttttt

SEQ ID NO: 18300 - DNA, 80 bp, synthetic construct
  misc_feature 1..80: note = Synthetic: >JQ065048_18-cand-2860-2939
  source 1..80: mol_type = other DNA
ctgtgaaaattgtgaaaagggtggtgtagatggtacctacatacctattgaagtcatagaaagtttgtctaaggccacag

SEQ ID NO: 18301 - DNA, 80 bp, synthetic construct
  misc_feature 1..80: note = Synthetic: >JQ065048_18-cand-2940-3019
  source 1..80: mol_type = other DNA
gattagcaccaaaaccaaccggacctgcatatgtgatttcaactgatgttactcaccaaggtgaatttattcaagctcgc

SEQ ID NO: 18302 - DNA, 80 bp, synthetic construct
  misc_feature 1..80: note = Synthetic: >JQ065048_18-cand-3020-3099
  source 1..80: mol_type = other DNA
ggtgccgttggtggtcgtacactgactactgtctttcgccagtccgacgttgttactactaatcaagtggctaagtcaac

SEQ ID NO: 18303 - DNA, 80 bp, synthetic construct
  misc_feature 1..80: note = Synthetic: >JQ065048_18-cand-3100-3179
  source 1..80: mol_type = other DNA
atattctcctaatgttgtgatagccgcaaacctatctgatgcaggtgctcttcgtaatgctaaagagtatgctgtcttat

SEQ ID NO: 18304 - DNA, 80 bp, synthetic construct
  misc_feature 1..80: note = Synthetic: >JQ065048_18-cand-3180-3259
  source 1..80: mol_type = other DNA
tgtctatagagttgggtagagtgattttcattgtagaccactcttatgatacaaaacaagacaactttaatgcagttaaa

SEQ ID NO: 18305 - DNA, 80 bp, synthetic construct
  misc_feature 1..80: note = Synthetic: >JQ065048_18-cand-3260-3339
  source 1..80: mol_type = other DNA
gctgctttagagaagttctatgtttttaaagatataatcagtacaggtgatttagcatcagatgtggcacgtgcaactga

SEQ ID NO: 18306 - DNA, 80 bp, synthetic construct
  misc_feature 1..80: note = Synthetic: >JQ065048_18-cand-3340-3419
  source 1..80: mol_type = other DNA
tggcttggtaactgatgatgttctcaatgctgctcttgtttctatagagcgtgacattgaatttactgtagaccctccta

SEQ ID NO: 18307 - DNA, 80 bp, synthetic construct
  misc_feature 1..80: note = Synthetic: >JQ065048_18-cand-3420-3499
  source 1..80: mol_type = other DNA
ataatactataccgcattatgcatttgattttgccagtattatgccagaggatcaagctcttcttaaacagcatgaatgt

SEQ ID NO: 18308 - DNA, 80 bp, synthetic construct
  misc_feature 1..80: note = Synthetic: >JQ065048_18-cand-3500-3579
  source 1..80: mol_type = other DNA
ggttccggtgttatgaaaggtactggaattaattgtgtcttgtctgctaacttagttaaattgttagcacctaagacttt

SEQ ID NO: 18309 - DNA, 80 bp, synthetic construct
  misc_feature 1..80: note = Synthetic: >JQ065048_18-cand-3580-3659
  source 1..80: mol_type = other DNA
agttaaattacgtaatgcagcgtcacgtaatggtattagactgtgtgtgtcgccttgtacgcgtgtattgcgtactagta

SEQ ID NO: 18310 - DNA, 80 bp, synthetic construct
  misc_feature 1..80: note = Synthetic: >JQ065048_18-cand-3660-3739
  source 1..80: mol_type = other DNA
ttcctgttgtcccttttggtatgaagggcggtagcaaaactgttaataagtgggctctattatttttagggtatttgtta

SEQ ID NO: 18311 - DNA, 80 bp, synthetic construct
  misc_feature 1..80: note = Synthetic: >JQ065048_18-cand-3740-3819
  source 1..80: mol_type = other DNA
gctataggtctctcttattgttttatgtggatggtaactccatcaccaccaactactctagttgacgtaccagctacaga

SEQ ID NO: 18312 - DNA, 80 bp, synthetic construct
  misc_feature 1..80: note = Synthetic: >JQ065048_18-cand-3820-3899
  source 1..80: mol_type = other DNA
ctttaggttaatacgcaatggcgtttttgacgtaattcgtagtactgacacatgcttctctaataagtttgtgtcattta

SEQ ID NO: 18313 - DNA, 80 bp, synthetic construct
  misc_feature 1..80: note = Synthetic: >JQ065048_18-cand-3900-3979
  source 1..80: mol_type = other DNA
gtacatggttaaatcgaccatttactaatagtcctgattgtccagttgttgtaggtgctatatcaacagttggtgcacaa

SEQ ID NO: 18314 - DNA, 80 bp, synthetic construct
  misc_feature 1..80: note = Synthetic: >JQ065048_18-cand-3980-4059
  source 1..80: mol_type = other DNA
attgcagggttaccaggccaagtgttgtggcgtaataatttattggtgcatgtctttgataaattctccacttctgtttt

SEQ ID NO: 18315 - DNA, 80 bp, synthetic construct
  misc_feature 1..80: note = Synthetic: >JQ065048_18-cand-4060-4139
  source 1..80: mol_type = other DNA
gggagatctgaatttactaggtcatgcatcctggaacaaaagaaatgctgtaggttatacagcatctactgttgtaacag

SEQ ID NO: 18316 - DNA, 80 bp, synthetic construct
  misc_feature 1..80: note = Synthetic: >JQ065048_18-cand-4140-4219
  source 1..80: mol_type = other DNA
gtaatagttatcttaactctatagctctgtataattctgagtgtgtttatttacgcttagaaggtcagagggagttgtat

SEQ ID NO: 18317 - DNA, 80 bp, synthetic construct
  misc_feature 1..80: note = Synthetic: >JQ065048_18-cand-4220-4299
  source 1..80: mol_type = other DNA
tgttatgatagggttaatgatcaacatcgtctctattctgatattaaacctcatgttacttatactgtagagagttctga

SEQ ID NO: 18318 - DNA, 80 bp, synthetic construct
  misc_feature 1..80: note = Synthetic: >JQ065048_18-cand-4300-4379
  source 1..80: mol_type = other DNA
tggtaagttattgccacttgttgtacctgatcagataatgtatacgccatacattgttaggttctcacaagttaattatt

SEQ ID NO: 18319 - DNA, 80 bp, synthetic construct
  misc_feature 1..80: note = Synthetic: >JQ065048_18-cand-4380-4459
  source 1..80: mol_type = other DNA
gtcgcatgggtcattgctttgataccaagcctggcatatgtatttcatttatacatgattttatagcatatacagacaat

SEQ ID NO: 18320 - DNA, 80 bp, synthetic construct
  misc_feature 1..80: note = Synthetic: >JQ065048_18-cand-4460-4539
  source 1..80: mol_type = other DNA
ttgcctcctggtgtcttttgtggtgataatatactgcatttgttgactaatgctgttataggtagtatagcagctaagga

SEQ ID NO: 18321 - DNA, 80 bp, synthetic construct
  misc_feature 1..80: note = Synthetic: >JQ065048_18-cand-4540-4619
  source 1..80: mol_type = other DNA
cgcatttaagtctacaacagctttgatgtgttcaacgggtgccattattgtctgtgttttggtggtgctttttatacaaa

SEQ ID NO: 18322 - DNA, 80 bp, synthetic construct
  misc_feature 1..80: note = Synthetic: >JQ065048_18-cand-4620-4699
  source 1..80: mol_type = other DNA
agctgtttaagggttatacaacatttgttttgatagtggttttaaacgccattattaatctcattttgttgtatacatat

SEQ ID NO: 18323 - DNA, 80 bp, synthetic construct
  misc_feature 1..80: note = Synthetic: >JQ065048_18-cand-4700-4779
  source 1..80: mol_type = other DNA
atgtatatacctgtgttagcaatcttgctctatggtttgtattgttatttaatcttattgtgtacacctatggctcgaac

SEQ ID NO: 18324 - DNA, 80 bp, synthetic construct
  misc_feature 1..80: note = Synthetic: >JQ065048_18-cand-4780-4859
  source 1..80: mol_type = other DNA
tgtagcagtcattttgattgcagttacagttatacctttgtgtactaatacttttataatagcagctgttgtagcagttt

SEQ ID NO: 18325 - DNA, 80 bp, synthetic construct
  misc_feature 1..80: note = Synthetic: >JQ065048_18-cand-4860-4939
  source 1..80: mol_type = other DNA
taatatatgctggtggctattattgttatattgtgtttagtactggtagggccgattttactagtttttcggccgcatct

SEQ ID NO: 18326 - DNA, 80 bp, synthetic construct
  misc_feature 1..80: note = Synthetic: >JQ065048_18-cand-4940-5019
  source 1..80: mol_type = other DNA
aaatctacatttgttatagatactaaaaagtatgttgaacttatgaatttggcaggctcggattttgatgcttatcttgc

SEQ ID NO: 18327 - DNA, 80 bp, synthetic construct
  misc_feature 1..80: note = Synthetic: >JQ065048_18-cand-5020-5099
  source 1..80: mol_type = other DNA
atcatatgccaagtataggtattatagtggtgctgctgatacatccgaatatagtaaggtgtgtatagcatttttggcaa

SEQ ID NO: 18328 - DNA, 80 bp, synthetic construct
  misc_feature 1..80: note = Synthetic: >JQ065048_18-cand-5100-5179
  source 1..80: mol_type = other DNA
aagcacttgattcatttaaagcagctggtggtactggtagtgttttatacacgccacctaagttggccgttgttcaatct

SEQ ID NO: 18329 - DNA, 80 bp, synthetic construct
  misc_feature 1..80: note = Synthetic: >JQ065048_18-cand-5180-5259
  source 1..80: mol_type = other DNA
ggcattaaaaagctgttgtcaccttctggacaagtcgagcagtgcgtagtttcagttgcttacaggggttctaatctgaa

SEQ ID NO: 18330 - DNA, 80 bp, synthetic construct
  misc_feature 1..80: note = Synthetic: >JQ065048_18-cand-5260-5339
  source 1..80: mol_type = other DNA
cggcctgtggttacatgatactatttatgtacctagacatattcttggtaagtatatggcctctcagtggcaggatgtgg

SEQ ID NO: 18331 - DNA, 80 bp, synthetic construct
  misc_feature 1..80: note = Synthetic: >JQ065048_2-cand-40-119
  source 1..80: mol_type = other DNA
caaacctggtgacggaccagtgcagggttttcgcatcgacccatttcaatctcgtggtcgatctgttgaacgcggccagc

SEQ ID NO: 18332 - DNA, 80 bp, synthetic construct
  misc_feature 1..80: note = Synthetic: >JQ065048_3-cand-40-119
  source 1..80: mol_type = other DNA
taacactctatcatctgcacttactaagatacagagtgttgtcaatcagcatactacagccttaaatcagctaactcagc

SEQ ID NO: 18333 - DNA, 80 bp, synthetic construct
  misc_feature 1..80: note = Synthetic: >JQ065048_4-cand-40-119
  source 1..80: mol_type = other DNA
atgttataacattgttaaagttgttgatcttgacaatgctaatgtaacattaccacctactacttatccagttgtggttg

SEQ ID NO: 18334 - DNA, 80 bp, synthetic construct
  misc_feature 1..80: note = Synthetic: >JQ065048_5-cand-40-119
  source 1..80: mol_type = other DNA
tttgaatcattataagagttataatgaaatagccttacgtaaggttaccactgtcttaggccctcccggtactggtaagt

SEQ ID NO: 18335 - DNA, 80 bp, synthetic construct
  misc_feature 1..80: note = Synthetic: >JQ065048_6-cand-0-79
  source 1..80: mol_type = other DNA
gtacgtttgtggttttgcaggctgttgatgttggactaactacatgtgcctatggagtagaggtagttggtaaattatac

SEQ ID NO: 18336 - DNA, 80 bp, synthetic construct
  misc_feature 1..80: note = Synthetic: >JQ065048_6-cand-90-169
  source 1..80: mol_type = other DNA
ttacaacacttaaagtgtctcagtttaaaacatgggttaatacactggctctacatgttggaaattgtattgtcacttgc

SEQ ID NO: 18337 - DNA, 80 bp, synthetic construct
  misc_feature 1..80: note = Synthetic: >JQ065048_7-cand-0-79
  source 1..80: mol_type = other DNA
tgattgcacttgtggtgctgatttgcagagcaatgcctatttaaacgagtgaagggttcaagtggtgcccgccttgaacc

SEQ ID NO: 18338 - DNA, 80 bp, synthetic construct
  misc_feature 1..80: note = Synthetic: >JQ065048_7-cand-110-189
  source 1..80: mol_type = other DNA
cgtaagggcatttcatgtctataattctaagaatgttggtatttttaccaatattaaaactaattgtgctcgacatcgag

SEQ ID NO: 18339 - DNA, 80 bp, synthetic construct
  misc_feature 1..80: note = Synthetic: >JQ065048_8-cand-0-79
  source 1..80: mol_type = other DNA
ctaaacctaattggttagcttctactgaaatatcagtagcggagtttaatgagtgggctcaaaataactcatatacgagt

SEQ ID NO: 18340 - DNA, 80 bp, synthetic construct
  misc_feature 1..80: note = Synthetic: >JQ065048_8-cand-240-319
  source 1..80: mol_type = other DNA
agatggtctataatcaggcacctataaatttacaagccaattatactaagctctttagttcattggcttggattgtttat

SEQ ID NO: 18341 - DNA, 80 bp, synthetic construct
  misc_feature 1..80: note = Synthetic: >JQ065048_8-cand-350-429
  source 1..80: mol_type = other DNA
gtgacacctcaatattacacaactgtgactttttgtgtgtctataatattagccatatgtactatgacattggtaaagca

SEQ ID NO: 18342 - DNA, 80 bp, synthetic construct
  misc_feature 1..80: note = Synthetic: >JQ065048_9-cand-0-79
  source 1..80: mol_type = other DNA
accaccatgtacaggtttgctatactaatgttggtcatttcgccaaccctagctgcatccatagctgataaagttttgga

SEQ ID NO: 18343 - DNA, 80 bp, synthetic construct
  misc_feature 1..80: note = Synthetic: >JQ065048_9-cand-110-189
  source 1..80: mol_type = other DNA
gttgtacccacaacactaccaacaaccccaagtaagggggtggactgatgatattggtgttgatggtcgcatacctgcaa

SEQ ID NO: 18344 - DNA, 80 bp, synthetic construct
  misc_feature 1..80: note = Synthetic: >JQ065048_9-cand-220-299
  source 1..80: mol_type = other DNA
caaataccaccacaccagttgatggtgtttatactagtcttcagcccttattaattcgttgtaagtttaaatacgtcaat

SEQ ID NO: 18345 - DNA, 80 bp, synthetic construct
  misc_feature 1..80: note = Synthetic: >JQ065049_1-cand-40-119
  source 1..80: mol_type = other DNA
cttattaatggttactacattgtttataaaaatggtacttatgttagagaggactattttacaaattaatatagtaatta

SEQ ID NO: 18346 - DNA, 80 bp, synthetic construct
  misc_feature 1..80: note = Synthetic: >JQ065049_10-cand-0-79
  source 1..80: mol_type = other DNA
ctggttgtacagcttttattgtaaccattactataaagcatactgtagtgtttttgacaacatttttgttgccaacactt

SEQ ID NO: 18347 - DNA, 80 bp, synthetic construct
  misc_feature 1..80: note = Synthetic: >JQ065049_10-cand-110-189
  source 1..80: mol_type = other DNA
tgggtacctaacacatatttacgttatatatatgagtggataataggttacactacatatgataattttactagctatac

SEQ ID NO: 18348 - DNA, 80 bp, synthetic construct
  misc_feature 1..80: note = Synthetic: >JQ065049_10-cand-220-299
  source 1..80: mol_type = other DNA
agtagctattaattttaccttacgtaatgttaggtataaggctacatctttagttgatttttgtttaaagtctttgcaat

SEQ ID NO: 18349 - DNA, 80 bp, synthetic construct
  misc_feature 1..80: note = Synthetic: >JQ065049_11-cand-0-79
  source 1..80: mol_type = other DNA
atgacgattctgcatttcccaacactataaacatttctgtttatacagattgtgatccgcaaaaccatgttgttctctgt

SEQ ID NO: 18350 - DNA, 80 bp, synthetic construct
  misc_feature 1..80: note = Synthetic: >JQ065049_11-cand-50-129
  source 1..80: mol_type = other DNA
tgtgatccgcaaaaccatgttgttctctgtgatgatagatatggtactgattggtcacaatttaaccaatttaagaatgc

SEQ ID NO: 18351 - DNA, 80 bp, synthetic construct
  misc_feature 1..80: note = Synthetic: >JQ065049_11-cand-160-239
  source 1..80: mol_type = other DNA
gtacccagcatttgtttgtacagctttgacaattaataatgttcccgttgaaggcgagaaattatacatttattgccgtg

SEQ ID NO: 18352 - DNA, 80 bp, synthetic construct
  misc_feature 1..80: note = Synthetic: >JQ065049_11-cand-270-349
  source 1..80: mol_type = other DNA
tttgtactcagggtcgattgctagataagtttactcccagatctaaaatggagagtgactttttaacaatggaccaatca

SEQ ID NO: 18353 - DNA, 80 bp, synthetic construct
  misc_feature 1..80: note = Synthetic: >JQ065049_11-cand-390-469
  source 1..80: mol_type = other DNA
accatataatttatggtgatgataccaaaccaatcattggtggtactcacacatttatatcattggtacgaaataaattt

SEQ ID NO: 18354 - DNA, 80 bp, synthetic construct
  misc_feature 1..80: note = Synthetic: >JQ065049_12-cand-0-79
  source 1..80: mol_type = other DNA
atttgttaactgtgtttatgcaagttttgcagacacaatattagatactttgacttttcctggattttccagtaaagttt

SEQ ID NO: 18355 - DNA, 80 bp, synthetic construct
  misc_feature 1..80: note = Synthetic: >JQ065049_12-cand-80-159
  source 1..80: mol_type = other DNA
ttaagagacctaaaaggcttgcacgtgttgctagacaaatgcaagaacttacggatcagattattttagataataattta

SEQ ID NO: 18356 - DNA, 80 bp, synthetic construct
  misc_feature 1..80: note = Synthetic: >JQ065049_12-cand-160-239
  source 1..80: mol_type = other DNA
acccgtaattttcacgttactaatcagggcaatatatatggtggttcgtatctattgtcctatattactaataattcata

SEQ ID NO: 18357 - DNA, 80 bp, synthetic construct
  misc_feature 1..80: note = Synthetic: >JQ065049_12-cand-240-319
  source 1..80: mol_type = other DNA
tcctatttttggggtttaccgttcatatcaacctttgttggttagatgtgttttttccttttctatgaatggtaatatta

SEQ ID NO: 18358 - DNA, 80 bp, synthetic construct
  misc_feature 1..80: note = Synthetic: >JQ065049_12-cand-320-399
  source 1..80: mol_type = other DNA
caggcaatggtaaagattgggtttacacttttaacccgtctactaccaatggtaactgtaattcccctttacagaataaa

SEQ ID NO: 18359 - DNA, 80 bp, synthetic construct
  misc_feature 1..80: note = Synthetic: >JQ065049_12-cand-400-479
  source 1..80: mol_type = other DNA
tataatggcacagttgatgccattaggtttgttactaatttttcagctttttcttctgaaattacatcttttatttttag

SEQ ID NO: 18360 - DNA, 80 bp, synthetic construct
  misc_feature 1..80: note = Synthetic: >JQ065049_12-cand-480-559
  source 1..80: mol_type = other DNA
aggtgaacatgaagtttctttttcatgtagtaacacctctaatgtaactgcacatgaacatttacttattgtaaatgcaa

SEQ ID NO: 18361 - DNA, 80 bp, synthetic construct
  misc_feature 1..80: note = Synthetic: >JQ065049_12-cand-560-639
  source 1..80: mol_type = other DNA
caacttttaagtctaatagtaatattttatattgttattttacttccaattttaatggtacattatcttctttttatgta

SEQ ID NO: 18362 - DNA, 80 bp, synthetic construct
  misc_feature 1..80: note = Synthetic: >JQ065049_12-cand-640-719
  source 1..80: mol_type = other DNA
ggtccatttccacctaatattgcggatgttacgatttttagatcaggcaacatttatgttaatggttattacctaggtta

SEQ ID NO: 18363 - DNA, 80 bp, synthetic construct
  misc_feature 1..80: note = Synthetic: >JQ065049_12-cand-720-799
  source 1..80: mol_type = other DNA
tataggaatgtccatacataatttttcaacacatcatgtaggtttaacttatatgtcatcgttgagaggtatttttacag

SEQ ID NO: 18364 - DNA, 80 bp, synthetic construct
  misc_feature 1..80: note = Synthetic: >JQ065049_12-cand-800-879
  source 1..80: mol_type = other DNA
accaagttgatgtacttgttaatattagtaattcagtaattaccaatatagtttattgtaatcattctttggtaaaccaa

SEQ ID NO: 18365 - DNA, 80 bp, synthetic construct
  misc_feature 1..80: note = Synthetic: >JQ065049_12-cand-880-959
  source 1..80: mol_type = other DNA
attaaatgtcaaagacatttatttgatttaccagatggtttttattcttattcatcagtgtcggatgtttcggtgcctga

SEQ ID NO: 18366 - DNA, 80 bp, synthetic construct
  misc_feature 1..80: note = Synthetic: >JQ065049_12-cand-950-1029
  source 1..80: mol_type = other DNA
cggtgcctgaaacagttatattattacctaaggaagttacttactctcgtgttaagttaacagcatttgctgagggtaat

SEQ ID NO: 18367 - DNA, 80 bp, synthetic construct
  misc_feature 1..80: note = Synthetic: >JQ065049_12-cand-1040-1119
  source 1..80: mol_type = other DNA
gtgttagtttgtctagtcttatactctctgagaataaaactaattctaacaccacttttaacgatactatatgtgttgac

SEQ ID NO: 18368 - DNA, 80 bp, synthetic construct
  misc_feature 1..80: note = Synthetic: >JQ065049_12-cand-1120-1199
  source 1..80: mol_type = other DNA
accacctattttaatttttatttaaaatttgcctgtggtggtggttcttttcgatgttctttatcttgcagatcagctgg

SEQ ID NO: 18369 - DNA, 80 bp, synthetic construct
  misc_feature 1..80: note = Synthetic: >JQ065049_12-cand-1200-1279
  source 1..80: mol_type = other DNA
ttgtccctttgatctacaaggtttaaacaactatctttcttttgatcacatatgtttttcattacttaataatggtggtt

SEQ ID NO: 18370 - DNA, 80 bp, synthetic construct
  misc_feature 1..80: note = Synthetic: >JQ065049_13-cand-0-79
  source 1..80: mol_type = other DNA
gaacctaaccatgtgctgcctcactatgcctttgacttttcttcacttagtgttgaagatcaatctgtattgttagatat

SEQ ID NO: 18371 - DNA, 80 bp, synthetic construct
  misc_feature 1..80: note = Synthetic: >JQ065049_13-cand-80-159
  source 1..80: mol_type = other DNA
gggttgtgttaaaggtaaccttaagggtaccaatgtgggtgttgttctaacagccaatttggttactcgtttaactcagc

SEQ ID NO: 18372 - DNA, 80 bp, synthetic construct
  misc_feature 1..80: note = Synthetic: >JQ065049_13-cand-160-239
  source 1..80: mol_type = other DNA
aggcattgcgtgttattagtaatgcagcatcacgtaatggtgtaacttgttctgttacgccttctacaagggttttgagg

SEQ ID NO: 18373 - DNA, 80 bp, synthetic construct
  misc_feature 1..80: note = Synthetic: >JQ065049_13-cand-240-319
  source 1..80: mol_type = other DNA
ggtaacatagttacacaaccttttgctcgtattaaagctggtaagtttagtaatcaaaatgttaaacttataaagctttt

SEQ ID NO: 18374 - DNA, 80 bp, synthetic construct
  misc_feature 1..80: note = Synthetic: >JQ065049_13-cand-330-409
  source 1..80: mol_type = other DNA
gcttttgtgtatgttgtagcttttgcaactttttatgttgctaatggtctcacatacaacacagttccaactgttaaatc

SEQ ID NO: 18375 - DNA, 80 bp, synthetic construct
  misc_feature 1..80: note = Synthetic: >JQ065049_13-cand-420-499
  source 1..80: mol_type = other DNA
gtatctgggttttatcttatacgcgatggtgtattggatactataagagctgaagatgattgttttatgaataagttttt

SEQ ID NO: 18376 - DNA, 80 bp, synthetic construct
  misc_feature 1..80: note = Synthetic: >JQ065049_13-cand-510-589
  source 1..80: mol_type = other DNA
agttatatacagaaaccttatgttaatagtccacaatgtcctattgttgtgggtatagctgatgtaactggtttgtcttt

SEQ ID NO: 18377 - DNA, 80 bp, synthetic construct
  misc_feature 1..80: note = Synthetic: >JQ065049_13-cand-600-679
  source 1..80: mol_type = other DNA
ccagctggtgttatacagcgtgatggacttatattgcatatatatgagcaatcattgtatgataaattgttgcgcaagtc

SEQ ID NO: 18378 - DNA, 80 bp, synthetic construct
  misc_feature 1..80: note = Synthetic: >JQ065049_13-cand-690-769
  source 1..80: mol_type = other DNA
ggtgttttaaacatacaaactagaaacttgtttaacataggtaataaaatggttgtaggttatacgcagcatgaggttgt

SEQ ID NO: 18379 - DNA, 80 bp, synthetic construct
  misc_feature 1..80: note = Synthetic: >JQ065049_13-cand-780-859
  source 1..80: mol_type = other DNA
tcttatttgtattcaccagcattgtttaatgctaagtgtacctttttattgtataataataataggacactttattgtta

SEQ ID NO: 18380 - DNA, 80 bp, synthetic construct
  misc_feature 1..80: note = Synthetic: >JQ065049_13-cand-870-949
  source 1..80: mol_type = other DNA
gatgtaccacataaactttattcagatgtaattccacatgtagaatataaggcagtggatcttaatggtgattatgttcc

SEQ ID NO: 18381 - DNA, 80 bp, synthetic construct
  misc_feature 1..80: note = Synthetic: >JQ065049_13-cand-960-1039
  source 1..80: mol_type = other DNA
ccagaacaattgttttattatccgcatgtagtaaggtatgtttctaataactattgccgtatgggacattgttttagaac

SEQ ID NO: 18382 - DNA, 80 bp, synthetic construct
  misc_feature 1..80: note = Synthetic: >JQ065049_13-cand-1040-1119
  source 1..80: mol_type = other DNA
agacccgggagtttgtgtatcttttgtggatgcttttccatatacacaaaatgatgtttatggtgtttattgtgcctcta

SEQ ID NO: 18383 - DNA, 80 bp, synthetic construct
  misc_feature 1..80: note = Synthetic: >JQ065049_13-cand-1230-1309
  source 1..80: mol_type = other DNA
atatttgcactatcttttcagcgactttttaaagagtatacagtttttgttgttactactttagtagttgctgtttttaa

SEQ ID NO: 18384 - DNA, 80 bp, synthetic construct
  misc_feature 1..80: note = Synthetic: >JQ065049_13-cand-1320-1399
  source 1..80: mol_type = other DNA
atctttttgttttataagataacattattagctatagtgtattatgttgtttatgtttatatagcactattagctgcacc

SEQ ID NO: 18385 - DNA, 80 bp, synthetic construct
  misc_feature 1..80: note = Synthetic: >JQ065049_14-cand-0-79
  source 1..80: mol_type = other DNA
agggtgttttagatgctaatttgtatgatggtcatgattttgttttggaaccaaagccaaatcatgtttatttagctgtt

SEQ ID NO: 18386 - DNA, 80 bp, synthetic construct
  misc_feature 1..80: note = Synthetic: >JQ065049_14-cand-80-159
  source 1..80: mol_type = other DNA
gatgatgttatacaaactgcagctaatgatttagacttgacattgtctcagtattgtatgtatttgaagaattgtcaggt

SEQ ID NO: 18387 - DNA, 80 bp, synthetic construct
  misc_feature 1..80: note = Synthetic: >JQ065049_14-cand-160-239
  source 1..80: mol_type = other DNA
tcgctggaccactaaacgtgttaaaggtcttgttcaccttcaacagcagagtaacaattgttttgttagtagtgctttga

SEQ ID NO: 18388 - DNA, 80 bp, synthetic construct
  misc_feature 1..80: note = Synthetic: >JQ065049_14-cand-250-329
  source 1..80: mol_type = other DNA
aaacactcactataagtttagacctgttatagatgctttatatcaggagtatttgaatggcaatcctagccgtttagtag

SEQ ID NO: 18389 - DNA, 80 bp, synthetic construct
  misc_feature 1..80: note = Synthetic: >JQ065049_14-cand-330-409
  source 1..80: mol_type = other DNA
catggatatatgcatctatatcacagagtattggagaattaggatgtccccagcaagttttgaatttgttggttttaaat

SEQ ID NO: 18390 - DNA, 80 bp, synthetic construct
  misc_feature 1..80: note = Synthetic: >JQ065049_14-cand-410-489
  source 1..80: mol_type = other DNA
tctaattcaaaattttcaggagtcacacattgttgtaagagatattttacacatgatggtgtcgtcgccaatgttgaaga

SEQ ID NO: 18391 - DNA, 80 bp, synthetic construct
  misc_feature 1..80: note = Synthetic: >JQ065049_14-cand-490-569
  source 1..80: mol_type = other DNA
atttgacttattacagtcaaaagtatattgtgttcagtgtgaatgttggacaacattcgatgctgaacaaacagaaggag

SEQ ID NO: 18392 - DNA, 80 bp, synthetic construct
  misc_feature 1..80: note = Synthetic: >JQ065049_14-cand-570-649
  source 1..80: mol_type = other DNA
ttattactgttgggcgtacttcaggtccagcacctactcatgccattatgtttggcaatgctcattgttggtatactgat

SEQ ID NO: 18393 - DNA, 80 bp, synthetic construct
  misc_feature 1..80: note = Synthetic: >JQ065049_14-cand-650-729
  source 1..80: mol_type = other DNA
ggccgtaaatctgtgaatggctatgacattcaagctgatgttgttgctatttatcataaatttaacaaggttcccgagca

SEQ ID NO: 18394 - DNA, 80 bp, synthetic construct
  misc_feature 1..80: note = Synthetic: >JQ065049_14-cand-730-809
  source 1..80: mol_type = other DNA
gactgcaatgcttgctcaggtttttgaaacttcaaataaatatgaagttttaaaagtagatcctgttattaatgatgatc

SEQ ID NO: 18395 - DNA, 80 bp, synthetic construct
  misc_feature 1..80: note = Synthetic: >JQ065049_14-cand-810-889
  source 1..80: mol_type = other DNA
aacttcaggatgtggttgttacaattcaacaacctgcagtacctaaatgtgaggttttgcaaaatcctaatacaatagat

SEQ ID NO: 18396 - DNA, 80 bp, synthetic construct
  misc_feature 1..80: note = Synthetic: >JQ065049_14-cand-890-969
  source 1..80: mol_type = other DNA
ttgttggatgtttggatcagaaaaccgacatttttgttggttaaatcttggtccgttataggtaaaaccttgttcaaagc

SEQ ID NO: 18397 - DNA, 80 bp, synthetic construct
  misc_feature 1..80: note = Synthetic: >JQ065049_14-cand-970-1049
  source 1..80: mol_type = other DNA
aggtaaggttgtgtttttaagcacaaggattcttaatcgtatttatgaatatttgtgccagataggtgcagttgatcgca

SEQ ID NO: 18398 - DNA, 80 bp, synthetic construct
  misc_feature 1..80: note = Synthetic: >JQ065049_14-cand-1050-1129
  source 1..80: mol_type = other DNA
ctgctaagttgtcatttaacttggcttataagtgtgtgaaatctgtttgtccgaaaccacaaactgttggtagagttgtt

SEQ ID NO: 18399 - DNA, 80 bp, synthetic construct
  misc_feature 1..80: note = Synthetic: >JQ065049_14-cand-1130-1209
  source 1..80: mol_type = other DNA
aagggtatgttttattcttttagaactatacttttagcaatggctccattgttgctgttacctgcagttacaatattgtt

SEQ ID NO: 18400 - DNA, 80 bp, synthetic construct
  misc_feature 1..80: note = Synthetic: >JQ065049_14-cand-1210-1289
  source 1..80: mol_type = other DNA
gcgtgcaggtgtacaagtttttacttattattatgctaaaacaggttggccttgtaattataatggtactataccatatg

SEQ ID NO: 18401 - DNA, 80 bp, synthetic construct
  misc_feature 1..80: note = Synthetic: >JQ065049_14-cand-1290-1369
  source 1..80: mol_type = other DNA
attaccagtctttctgtgttgggcagccattaacatgtatggcatgttttgatggttatgactcattgcatttatatcag

SEQ ID NO: 18402 - DNA, 80 bp, synthetic construct
  misc_feature 1..80: note = Synthetic: >JQ065049_14-cand-1370-1449
  source 1..80: mol_type = other DNA
catttgcatataaatcaagttcctgttaaagatattgattatactacaattgctgcttttattgttttattagtggctaa

SEQ ID NO: 18403 - DNA, 80 bp, synthetic construct
  misc_feature 1..80: note = Synthetic: >JQ065049_14-cand-1450-1529
  source 1..80: mol_type = other DNA
tgctacattagcactagttacaactattataatattttgtgttaatttttataaatttaccttaccgttttatggtgtgg

SEQ ID NO: 18404 - DNA, 80 bp, synthetic construct
  misc_feature 1..80: note = Synthetic: >JQ065049_14-cand-1530-1609
  source 1..80: mol_type = other DNA
taattttggattattataatacattaacttttgtctttggtgtttcatacactattagacttataagattttttaggcat

SEQ ID NO: 18405 - DNA, 80 bp, synthetic construct
  misc_feature 1..80: note = Synthetic: >JQ065049_14-cand-1610-1689
  source 1..80: mol_type = other DNA
gttagtaagggatgtaaatctcctacatgtactatttgttctaggatacgtacttcacctactataactgttgaaacaat

SEQ ID NO: 18406 - DNA, 80 bp, synthetic construct
  misc_feature 1..80: note = Synthetic: >JQ065049_14-cand-1690-1769
  source 1..80: mol_type = other DNA
agttcagggacgtaagtatccatctactattataactaatgaaggttctgttgtttgtaaacaacataacttttattgta

SEQ ID NO: 18407 - DNA, 80 bp, synthetic construct
  misc_feature 1..80: note = Synthetic: >JQ065049_14-cand-1770-1849
  source 1..80: mol_type = other DNA
agaactgtgatgctataaatccagatacttttatacctgttgaagcagtagagtctttagctaaagtaactaagcttgat

SEQ ID NO: 18408 - DNA, 80 bp, synthetic construct
  misc_feature 1..80: note = Synthetic: >JQ065049_14-cand-1850-1929
  source 1..80: mol_type = other DNA
gttaaatctactgcaccagcttatgttttagctcgtgacgtggagtgtcaatctgatgctatagttgctcgagccattat

SEQ ID NO: 18409 - DNA, 80 bp, synthetic construct
  misc_feature 1..80: note = Synthetic: >JQ065049_15-cand-0-79
  source 1..80: mol_type = other DNA
cggttatacacttagaactggcaatgtagtgcctggtgtacaggtattggatcctaagacaacccttaccgggtttgaaa

SEQ ID NO: 18410 - DNA, 80 bp, synthetic construct
  misc_feature 1..80: note = Synthetic: >JQ065049_15-cand-90-169
  source 1..80: mol_type = other DNA
tgttcaaccaactcttcgtgctattggaaatcttcttgagagtgcacgtactgatggttgggttaattcaaaggacttta

SEQ ID NO: 18411 - DNA, 80 bp, synthetic construct
  misc_feature 1..80: note = Synthetic: >JQ065049_15-cand-170-249
  source 1..80: mol_type = other DNA
tggctgttaaagccaaagagctaacatttactgatgatgttttgcgtgttatgattcgtcatggtgcagcaagaattcca

SEQ ID NO: 18412 - DNA, 80 bp, synthetic construct
  misc_feature 1..80: note = Synthetic: >JQ065049_15-cand-250-329
  source 1..80: mol_type = other DNA
tttcttgcatccttggctttgttttaccggctgataaatattaatgttaaggatttgtattttattgctgaggatgtggc

SEQ ID NO: 18413 - DNA, 80 bp, synthetic construct
  misc_feature 1..80: note = Synthetic: >JQ065049_15-cand-330-409
  source 1..80: mol_type = other DNA
aagggagcttgcctattcagctgacttttcaactgttttggcggatgttaaaacaattgaatgtattcacacagatggtt

SEQ ID NO: 18414 - DNA, 80 bp, synthetic construct
  misc_feature 1..80: note = Synthetic: >JQ065049_15-cand-410-489
  source 1..80: mol_type = other DNA
atttaaccataaacattaataagctaggtaataaatttacttctagcttagtagctcaggcagaacctactaatggttcc

SEQ ID NO: 18415 - DNA, 80 bp, synthetic construct
  misc_feature 1..80: note = Synthetic: >JQ065049_15-cand-490-569
  source 1..80: mol_type = other DNA
cttacttttggaaactttgtgttgtggcctcgtgctacagcaattaaggtgaatgatgagtttttgccttttgctggtaa

SEQ ID NO: 18416 - DNA, 80 bp, synthetic construct
  misc_feature 1..80: note = Synthetic: >JQ065049_15-cand-570-649
  source 1..80: mol_type = other DNA
ggcaattactgcaacacaggttggtaatccttatgatgaggatgttaaccttttgcctgattaccaacaattacctgttg

SEQ ID NO: 18417 - DNA, 80 bp, synthetic construct
  misc_feature 1..80: note = Synthetic: >JQ065049_15-cand-650-729
  source 1..80: mol_type = other DNA
atgtggtagagggcactgttgtcactgtgcgtggctataagtacattaaaacaactgctgcacctcctctttactatcct

SEQ ID NO: 18418 - DNA, 80 bp, synthetic construct
  misc_feature 1..80: note = Synthetic: >JQ065049_15-cand-730-809
  source 1..80: mol_type = other DNA
atagtgaagggtggtgtattgccagttgctctaaaacagcagggctctgcaagtaagaaacttaatgttgtttttcatgc

SEQ ID NO: 18419 - DNA, 80 bp, synthetic construct
  misc_feature 1..80: note = Synthetic: >JQ065049_15-cand-810-889
  source 1..80: mol_type = other DNA
atctcccaatgatgtattgttggcttttatacagctacaggaatttttaaatcgttctacttcatcaacattggatgttg

SEQ ID NO: 18420 - DNA, 80 bp, synthetic construct
  misc_feature 1..80: note = Synthetic: >JQ065049_15-cand-890-969
  source 1..80: mol_type = other DNA
tttctaaagatgtttatgaagtggcacctgatgtaactgttaccataggtccatcaaaacctggtgacattgtcgttcat

SEQ ID NO: 18421 - DNA, 80 bp, synthetic construct
  misc_feature 1..80: note = Synthetic: >JQ065049_15-cand-970-1049
  source 1..80: mol_type = other DNA
gatgatgaggaatatttgaagtgttttttaacacctgatgttcctcttctttacaaggtgtttcaaactgagtcttgggc

SEQ ID NO: 18422 - DNA, 80 bp, synthetic construct
  misc_feature 1..80: note = Synthetic: >JQ065049_15-cand-1050-1129
  source 1..80: mol_type = other DNA
aaaggtagctgtcatgtgttctaacattcgtgttagagtttcagacactttgacaggatttttgacatttttacaatgtt

SEQ ID NO: 18423 - DNA, 80 bp, synthetic construct
  misc_feature 1..80: note = Synthetic: >JQ065049_15-cand-1130-1209
  source 1..80: mol_type = other DNA
tgtgtgataaattacccacacttgttggtgtggtaaattgtattatacaagctcttgaagaactttcactttttgctgct

SEQ ID NO: 18424 - DNA, 80 bp, synthetic construct
  misc_feature 1..80: note = Synthetic: >JQ065049_15-cand-1210-1289
  source 1..80: mol_type = other DNA
gcaaaaatttctaatattagacttacctataaggcagggagtctagttgttgatgctgtgtctagtgtggcaactctttg

SEQ ID NO: 18425 - DNA, 80 bp, synthetic construct
  misc_feature 1..80: note = Synthetic: >JQ065049_15-cand-1290-1369
  source 1..80: mol_type = other DNA
ccagccccttctagactttttgacaccatttttgagcaaggttgctaattttgctacttatgcagttggcaactatatgc

SEQ ID NO: 18426 - DNA, 80 bp, synthetic construct
  misc_feature 1..80: note = Synthetic: >JQ065049_15-cand-1380-1459
  source 1..80: mol_type = other DNA
ttcagttggcacatttttgttgaatcgtaccaaaatttgtgctaacaagatacggtatgcaattgactatgcgggtgttt

SEQ ID NO: 18427 - DNA, 80 bp, synthetic construct
  misc_feature 1..80: note = Synthetic: >JQ065049_15-cand-1460-1539
  source 1..80: mol_type = other DNA
atcccgttgttgaagcaaagcctaaaattcagtattgtgatggcttgacacccgttcatgccaaaccaaaagctgagttg

SEQ ID NO: 18428 - DNA, 80 bp, synthetic construct
  misc_feature 1..80: note = Synthetic: >JQ065049_15-cand-1540-1619
  source 1..80: mol_type = other DNA
tttcctactgatgttgtgttggataacacaattattcagatggcttctgatggtcaacatctttacatgtttgacggtac

SEQ ID NO: 18429 - DNA, 80 bp, synthetic construct
  misc_feature 1..80: note = Synthetic: >JQ065049_15-cand-1620-1699
  source 1..80: mol_type = other DNA
acaagcacatgaacaggcattcttagctggtgtttctgatgacataacagttagttatgtttgtgatgtgttttctgatg

SEQ ID NO: 18430 - DNA, 80 bp, synthetic construct
  misc_feature 1..80: note = Synthetic: >JQ065049_15-cand-1700-1779
  source 1..80: mol_type = other DNA
aagtcaatgaagctattaatagcacattgtcgtcttatgaattaaactcttttgttgtgccttcggatgcaactgcagag

SEQ ID NO: 18431 - DNA, 80 bp, synthetic construct
  misc_feature 1..80: note = Synthetic: >JQ065049_15-cand-1780-1859
  source 1..80: mol_type = other DNA
tttataacacaacagtgtattgcatcgcttgttgatgcaataaatgattatcatcctgaatatgttttgtcacttatgga

SEQ ID NO: 18432 - DNA, 80 bp, synthetic construct
  misc_feature 1..80: note = Synthetic: >JQ065049_15-cand-1870-1949
  source 1..80: mol_type = other DNA
gtgtgttcatcttttgatgatttacctttggcttcacatcatattcctgataagcttgaattgtatgttcaagctttgga

SEQ ID NO: 18433 - DNA, 80 bp, synthetic construct
  misc_feature 1..80: note = Synthetic: >JQ065049_15-cand-1950-2029
  source 1..80: mol_type = other DNA
taatgatgatagtgatgatattaatgttgatgaagatgattgtcattttcaggacactgcagaagatgatggtggtgtta

SEQ ID NO: 18434 - DNA, 80 bp, synthetic construct
  misc_feature 1..80: note = Synthetic: >JQ065049_15-cand-2030-2109
  source 1..80: mol_type = other DNA
tccctacttgttgggtgatacctgaaataccatcttttactaaggctgatgtaacgtctgttgacgttaagcctgatgaa

SEQ ID NO: 18435 - DNA, 80 bp, synthetic construct
  misc_feature 1..80: note = Synthetic: >JQ065049_15-cand-2110-2189
  source 1..80: mol_type = other DNA
aaagcccaggaattggattcaactttagtacagaaaactgttatagtagaacgttttactgtgcatgaccttaaagcatt

SEQ ID NO: 18436 - DNA, 80 bp, synthetic construct
  misc_feature 1..80: note = Synthetic: >JQ065049_15-cand-2190-2269
  source 1..80: mol_type = other DNA
tgatttgaagttggatgttataccagaagaatcagatgttgatgttaattctatggagacttcagatgtttgttcagaat

SEQ ID NO: 18437 - DNA, 80 bp, synthetic construct
  misc_feature 1..80: note = Synthetic: >JQ065049_15-cand-2270-2349
  source 1..80: mol_type = other DNA
gttccgttgaatattatcaggacgcattggatgatgacactacaattataacagatgagtctgatgttgtttttcaagat

SEQ ID NO: 18438 - DNA, 80 bp, synthetic construct
  misc_feature 1..80: note = Synthetic: >JQ065049_15-cand-2350-2429
  source 1..80: mol_type = other DNA
gagcttttggccactgttgtaaaccagtgttctcaggttgataataatattcctgagatcgcaaagaaacctaattctcc

SEQ ID NO: 18439 - DNA, 80 bp, synthetic construct
  misc_feature 1..80: note = Synthetic: >JQ065049_15-cand-2430-2509
  source 1..80: mol_type = other DNA
tactgttgtagagctagttgttgctgacttgaaaactttaaagtatgacaatagtgtgttggttaacccagctaatgaat

SEQ ID NO: 18440 - DNA, 80 bp, synthetic construct
  misc_feature 1..80: note = Synthetic: >JQ065049_15-cand-2510-2589
  source 1..80: mol_type = other DNA
atttgagacatggtggtggagctgcagcagctatagcaaaaatggcaggtcctgactatgttaaatattgtgatgaacat

SEQ ID NO: 18441 - DNA, 80 bp, synthetic construct
  misc_feature 1..80: note = Synthetic: >JQ065049_2-cand-20-99
  source 1..80: mol_type = other DNA
aaccattcatctaagtttggttttgaaagcttgatatctactccaactttttattattattctaacaatactaattgttc

SEQ ID NO: 18442 - DNA, 80 bp, synthetic construct
  misc_feature 1..80: note = Synthetic: >JQ065049_3-cand-30-109
  source 1..80: mol_type = other DNA
acaatgtctgattttatacctatacaatcttgtatagttcagtatattaatgttacgcaggaagatttacccagcataat

SEQ ID NO: 18443 - DNA, 80 bp, synthetic construct
  misc_feature 1..80: note = Synthetic: >JQ065049_4-cand-0-79
  source 1..80: mol_type = other DNA
catgtagagtatatgcccaatcttgggttggcatagatgttgaagctgctcatgctgttaaacctaatgtaggtactaat

SEQ ID NO: 18444 - DNA, 80 bp, synthetic construct
  misc_feature 1..80: note = Synthetic: >JQ065049_4-cand-80-159
  source 1..80: mol_type = other DNA
ttaccattacaagttggttttagtacaggtgttaatttttctgttgtacctgaaggtatttggattgatgaacatggcac

SEQ ID NO: 18445 - DNA, 80 bp, synthetic construct
  misc_feature 1..80: note = Synthetic: >JQ065049_5-cand-0-79
  source 1..80: mol_type = other DNA
acaaagctcaaaaatatatatatatatttttgttgctcctagcttcgctagattccgcttgacaccaatcctaggtgcat

SEQ ID NO: 18446 - DNA, 80 bp, synthetic construct
  misc_feature 1..80: note = Synthetic: >JQ065049_6-cand-0-79
  source 1..80: mol_type = other DNA
atgcataatgtcactatggttccatcttattgtagtaacacagttacaccctgtcacatacctaatgggcagggacctta

SEQ ID NO: 18447 - DNA, 80 bp, synthetic construct
  misc_feature 1..80: note = Synthetic: >JQ065049_6-cand-120-199
  source 1..80: mol_type = other DNA
gaaatagctgacactggtgaatcacattctccccatgctgcattagttttggaggagtcaggcagtaaggtttggaaaat

SEQ ID NO: 18448 - DNA, 80 bp, synthetic construct
  misc_feature 1..80: note = Synthetic: >JQ065049_6-cand-170-249
  source 1..80: mol_type = other DNA
ggaggagtcaggcagtaaggtttggaaaattcactggcaaagaggaggtgatgatggtcctgggcactgtattacagtgt

SEQ ID NO: 18449 - DNA, 80 bp, synthetic construct
  misc_feature 1..80: note = Synthetic: >JQ065049_7-cand-0-79
  source 1..80: mol_type = other DNA
ctcttaaggttatatttaatgacaaagagagttatatgcagtatattacaggtaacattcttatatataagggtgtttcc

SEQ ID NO: 18450 - DNA, 80 bp, synthetic construct
  misc_feature 1..80: note = Synthetic: >JQ065049_7-cand-130-209
  source 1..80: mol_type = other DNA
accagaagaatatcctgtagttgttgaaactattaaggttggtattcctaatatacaaaataatgagttatgtttgcgta

SEQ ID NO: 18451 - DNA, 80 bp, synthetic construct
  misc_feature 1..80: note = Synthetic: >JQ065049_7-cand-180-259
  source 1..80: mol_type = other DNA
atatacaaaataatgagttatgtttgcgtaatgtatttacagcgcaaaatgttgcttatgatattaatggtaaagaagaa

SEQ ID NO: 18452 - DNA, 80 bp, synthetic construct
  misc_feature 1..80: note = Synthetic: >JQ065049_8-cand-130-209
  source 1..80: mol_type = other DNA
tgtattaagttagtatataagtgttataagggtgctacggtactcttaaatccatttataatattttctagtaaggtgga

SEQ ID NO: 18453 - DNA, 80 bp, synthetic construct
  misc_feature 1..80: note = Synthetic: >JQ065049_8-cand-240-319
  source 1..80: mol_type = other DNA
acaccaatttcctagaaactcttttagtgtttaagatggcttctgagagttcttatcagcttcgtgctgttcaagaattt

SEQ ID NO: 18454 - DNA, 80 bp, synthetic construct
  misc_feature 1..80: note = Synthetic: >JQ065049_9-cand-0-79
  source 1..80: mol_type = other DNA
catgccatcccgaagagaactttgcagaaaggcaagaccatttcagcagtttttgggaaacgttctccagcaggttcaaa

SEQ ID NO: 18455 - DNA, 80 bp, synthetic construct
  misc_feature 1..80: note = Synthetic: >JQ065049_9-cand-120-199
  source 1..80: mol_type = other DNA
ggacgtattatggcattagctcgtcaggttcctggtgttcaggagatgctttttgcagggcatcttagtcaccaattcca

SEQ ID NO: 18456 - DNA, 80 bp, synthetic construct
  misc_feature 1..80: note = Synthetic: >JQ989270_1-cand-20-99
  source 1..80: mol_type = other DNA
atgaaccacgtgttcctcagttctccgactttgtgcaagttgagaattgtgttgtgtcttatttgaatctttctgatgtt

SEQ ID NO: 18457 - DNA, 80 bp, synthetic construct
  misc_feature 1..80: note = Synthetic: >JQ989270_3-cand-180-259
  source 1..80: mol_type = other DNA
cacaagaacctactcctaacactggtggtgttaattgtgtagtagataagcaatttcctttcacttttcaacacgaggct

SEQ ID NO: 18458 - DNA, 80 bp, synthetic construct
  misc_feature 1..80: note = Synthetic: >JQ989270_3-cand-490-569
  source 1..80: mol_type = other DNA
gcaacacgtcttccctgtttcacctggtggtttaatacctcctgattttagttttgacggttggtatgttttaaccaact

SEQ ID NO: 18459 - DNA, 80 bp, synthetic construct
  misc_feature 1..80: note = Synthetic: >JQ989270_3-cand-590-669
  source 1..80: mol_type = other DNA
aagtttgttgcatctcaacctttaaaattgttgtgcctttggcctgtacctgctttggattctagtgctagtgttgttta

SEQ ID NO: 18460 - DNA, 80 bp, synthetic construct
  misc_feature 1..80: note = Synthetic: >JQ989270_3-cand-690-769
  source 1..80: mol_type = other DNA
gtgcgcaatgcaatggtgctactgaaaatggtttagccgatgcattacgtttttctatgaatttctctagaaatggtttc

SEQ ID NO: 18461 - DNA, 80 bp, synthetic construct; identical to SEQ ID NO: 18456
  misc_feature 1..80: note = Synthetic: >JQ989271_1-cand-20-99
  source 1..80: mol_type = other DNA

SEQ ID NO: 18462 - DNA, 80 bp, synthetic construct; identical to SEQ ID NO: 18457
  misc_feature 1..80: note = Synthetic: >JQ989271_3-cand-180-259
  source 1..80: mol_type = other DNA

SEQ ID NO: 18463 - DNA, 80 bp, synthetic construct; identical to SEQ ID NO: 18458
  misc_feature 1..80: note = Synthetic: >JQ989271_3-cand-490-569
  source 1..80: mol_type = other DNA

SEQ ID NO: 18464 - DNA, 80 bp, synthetic construct; identical to SEQ ID NO: 18459
  misc_feature 1..80: note = Synthetic: >JQ989271_3-cand-590-669
  source 1..80: mol_type = other DNA

SEQ ID NO: 18465 - DNA, 80 bp, synthetic construct
  misc_feature 1..80: note = Synthetic: >JQ989271_3-cand-690-769
  source 1..80: mol_type = other DNA
gtgcgcaatgcaacggtgctactgaaaatggtctagccgatgcattacgttttgctatgaatttctctagaaatggtttt

SEQ ID NO: 18466 - DNA, 80 bp, synthetic construct
  misc_feature 1..80: note = Synthetic: >JX897900_2-cand-0-79
  source 1..80: mol_type = other DNA
tggaaatgttaagtttctatgcatccactaagcctataggttttgattcacctgtattagataattttactactggtgat

SEQ ID NO: 18467 - DNA, 80 bp, synthetic construct
  misc_feature 1..80: note = Synthetic: >JX993987_1-cand-130-209
  source 1..80: mol_type = other DNA
cgcggctggattttcggttcaacttttgacaaccgatcacagtctgccattatagtgaacaattctacacacattttagt

SEQ ID NO: 18468 - DNA, 80 bp, synthetic construct
  misc_feature 1..80: note = Synthetic: >JX993987_1-cand-220-299
  source 1..80: mol_type = other DNA
aattttgttttatgtactgagcccatgtttacggtgtctcgtaatcagcattacaaatcatgggtttatcaacatgctag

SEQ ID NO: 18469 - DNA, 80 bp, synthetic construct
  misc_feature 1..80: note = Synthetic: >JX993987_1-cand-310-389
  source 1..80: mol_type = other DNA
tatgatgttgcttatcctagttttcaattagatgtctctctaaagaataatgttaattttcaacatttgagggagttcat

SEQ ID NO: 18470 - DNA, 80 bp, synthetic construct
  misc_feature 1..80: note = Synthetic: >JX993987_1-cand-400-479
  source 1..80: mol_type = other DNA
gtggatggcttcctaaagatttattcttcttatgagcccatcaatgttgttagtggcatacctagtggcttttcagtact

SEQ ID NO: 18471 - DNA, 80 bp, synthetic construct
  misc_feature 1..80: note = Synthetic: >JX993987_1-cand-490-569
  source 1..80: mol_type = other DNA
atgagcttgccgttgggtattaatattactggcatgcgtgttgttatgactatgtttagcaacacgcaagctaattttct

SEQ ID NO: 18472 - DNA, 80 bp, synthetic construct
  misc_feature 1..80: note = Synthetic: >JX993988_1-cand-0-79
  source 1..80: mol_type = other DNA
ctcaggattatttcttaccatttcactctaatttaacgcagtacttttcattaaatgtcgattcggatcgtcaagtctat

SEQ ID NO: 18473 - DNA, 80 bp, synthetic construct
  misc_feature 1..80: note = Synthetic: >JX993988_1-cand-230-309
  source 1..80: mol_type = other DNA
cgtgtgtgtaattttaacctttgtaaagaacccatgtttacagtctctcgaggcgtccattttagttcttgggtttatca

SEQ ID NO: 18474 - DNA, 80 bp, synthetic construct
  misc_feature 1..80: note = Synthetic: >JX993988_1-cand-440-519
  source 1..80: mol_type = other DNA
cattcttatactcctgttgatattattagaggtatacctgtgggtttctcagttttgaagcctattcttaagcttcctat

SEQ ID NO: 18475 - DNA, 80 bp, synthetic construct
  misc_feature 1..80: note = Synthetic: >KC869678_1-cand-40-119
  source 1..80: mol_type = other DNA
tcatgaaacaaatgacactgttgaagaatgccatctttctttgggacaatcactctgtgctatacccccaaacaccaact

SEQ ID NO: 18476 - DNA, 80 bp, synthetic construct
  misc_feature 1..80: note = Synthetic: >KC869678_2-cand-40-119
  source 1..80: mol_type = other DNA
tgatgatggttgggctgcagctgttgaagaagcatttcctcttgatgaatctgaagaattttctgctgaagttgtgtgtg

SEQ ID NO: 18477 - DNA, 80 bp, synthetic construct
  misc_feature 1..80: note = Synthetic: >KC869678_3-cand-170-249
  source 1..80: mol_type = other DNA
gaactgtcttccaagttgcctattgtttacttcagcctcgcactgagtctaagtgtccaggcaatagtaactatgttagt

SEQ ID NO: 18478 - DNA, 80 bp, synthetic construct
  misc_feature 1..80: note = Synthetic: >KC869678_3-cand-250-329
  source 1..80: mol_type = other DNA
tactttttagccgattcacccagtgattgttcttccacttctgatgaaatacgcagaaatgggttacgagacattagaaa

SEQ ID NO: 18479 - DNA, 80 bp, synthetic construct
  misc_feature 1..80: note = Synthetic: >KC869678_3-cand-490-569
  source 1..80: mol_type = other DNA
gtacccatatatgataagcttaattactacacggtaatacctcgttccgttattacaccgtctaaccaacgtgatgcttg

SEQ ID NO: 18480 - DNA, 80 bp, synthetic construct
  misc_feature 1..80: note = Synthetic: >KC869678_3-cand-670-749
  source 1..80: mol_type = other DNA
tacacccagcttatctgttcgtatggtgattttaatatgaagtctggtgtatactcaacctcatactattcggctaaacc

SEQ ID NO: 18481 - DNA, 80 bp, synthetic construct
  misc_feature 1..80: note = Synthetic: >KC881005_1-cand-40-119
  source 1..80: mol_type = other DNA
gaccttggtgaaaaaccaggtaatttcaaggatctcagagagtttgttttcaggaataaagatggttttttgcatgttta

SEQ ID NO: 18482 - DNA, 80 bp, synthetic construct
  misc_feature 1..80: note = Synthetic: >KC881005_2-cand-20-99
  source 1..80: mol_type = other DNA
aacgaacatgaaattgttagttttagtttttgctactctagtctcctcttacactatagagaagtgccttgattttgatg

SEQ ID NO: 18483 - DNA, 80 bp, synthetic construct; identical to SEQ ID NO: 18481
  misc_feature 1..80: note = Synthetic: >KC881006_1-cand-40-119
  source 1..80: mol_type = other DNA

SEQ ID NO: 18484 - DNA, 80 bp, synthetic construct; identical to SEQ ID NO: 18481
  misc_feature 1..80: note = Synthetic: >KF367457_1-cand-40-119
  source 1..80: mol_type = other DNA

SEQ ID NO: 18485 - DNA, 80 bp, synthetic construct
  misc_feature 1..80: note = Synthetic: >KF430219_1-cand-0-79
  source 1..80: mol_type = other DNA
tgatgccccctatttacgtcaaataccttttggcattggtgacacgccatattattgctatcttaatgtcactactgaca

SEQ ID NO: 18486 - DNA, 80 bp, synthetic construct
  misc_feature 1..80: note = Synthetic: >KF530123_1-cand-40-119
  source 1..80: mol_type = other DNA
agtgacttttttgaacgctacatatacaaaatttcaggatattgtgattgattatattgatatcaacaagactatctctg

SEQ ID NO: 18487 - DNA, 80 bp, synthetic construct
  misc_feature 1..80: note = Synthetic: >KF530123_2-cand-0-79
  source 1..80: mol_type = other DNA
aatgccattggtaatattacactagcactgggaaaagtctacgatgctattacaaccataccagatggttttaatagtgt

SEQ ID NO: 18488 - DNA, 80 bp, synthetic construct
  misc_feature 1..80: note = Synthetic: >KF530123_2-cand-100-179
  source 1..80: mol_type = other DNA
ttcagagtgtagttaaccaacagggtgaagcgttgagtcaacttactagtcagttacagaagaattttcaggctattagc

SEQ ID NO: 18489 - DNA, 80 bp, synthetic construct
  misc_feature 1..80: note = Synthetic: >KF530123_3-cand-200-279
  source 1..80: mol_type = other DNA
gaccgtatcggtttgttaattttagtgcgtggaaaatcgcagtacagtctacttatggttttagaagatgatgtggaagc

SEQ ID NO: 18490 - DNA, 80 bp, synthetic construct
  misc_feature 1..80: note = Synthetic: >KF530123_4-cand-0-79
  source 1..80: mol_type = other DNA
gcatattaccaccaactgtaagagagttagcttttggtagggatggttccatctttgttaatggttacaaatattttagt

SEQ ID NO: 18491 - DNA, 80 bp, synthetic construct
  misc_feature 1..80: note = Synthetic: >KF530123_4-cand-90-169
  source 1..80: mol_type = other DNA
ttaagagtgtcaacttttccattagttcagttgaaaattatggcttttggaccatagcctatactaattatacagatgta

SEQ ID NO: 18492 - DNA, 80 bp, synthetic construct
  misc_feature 1..80: note = Synthetic: >KF530123_4-cand-360-439
  source 1..80: mol_type = other DNA
tacatgttgtattaaatgacacagagaaagggacagacatcattcttgccaaggcaaatgaattagcctcacttgctgac

SEQ ID NO: 18493 - DNA, 80 bp, synthetic construct
  misc_feature 1..80: note = Synthetic: >KF530123_4-cand-450-529
  source 1..80: mol_type = other DNA
aaatagctcaggccaacggcagtgtgaccaatgttactagtctatgtgtccaaacaagacagttggctctattctataag

SEQ ID NO: 18494 - DNA, 80 bp, synthetic construct
  misc_feature 1..80: note = Synthetic: >KF530123_4-cand-1050-1129
  source 1..80: mol_type = other DNA
agtttgtaaaccacacacaatcaagaaggtcacgtagttcaacatctgagactgtaacaacctatactatgccacaattt

SEQ ID NO: 18495 - DNA, 80 bp, synthetic construct
  misc_feature 1..80: note = Synthetic: >KF569996_1-cand-40-119
  source 1..80: mol_type = other DNA
attaaaattacctttaggcctcaatattactaatttcagagtacttcttactgcttttatacctaacataggaacatggg

SEQ ID NO: 18496 - DNA, 80 bp, synthetic construct
  misc_feature 1..80: note = Synthetic: >KF569996_2-cand-40-119
  source 1..80: mol_type = other DNA
ctaacgttgttggactcatgtccttcaactatagatttgataatcccattattcctttcaaagatggtgtctatttcgca

SEQ ID NO: 18497 - DNA, 80 bp, synthetic construct
  misc_feature 1..80: note = Synthetic: >KF636752_1-cand-40-119
  source 1..80: mol_type = other DNA
ataccactaatgcaccgtgggatgccatggaatatagtgcgtgctagaattgtacagatgatgagtgacactcttaaagg

SEQ ID NO: 18498 - DNA, 80 bp, synthetic construct
  misc_feature 1..80: note = Synthetic: >KF636752_10-cand-120-199
  source 1..80: mol_type = other DNA
agacaggaatctcagttcagactatgtgtgcatcacttaaagatttgcttgttcatggtatgagaggcagatgtatactg

SEQ ID NO: 18499 - DNA, 80 bp, synthetic construct
  misc_feature 1..80: note = Synthetic: >KF636752_10-cand-210-289
  source 1..80: mol_type = other DNA
cactcgaggatgagttcacaccctttgacattgtacgccaatgttctggtgttactttgcaaagtactgttagaagtgtt

SEQ ID NO: 18500 - DNA, 80 bp, synthetic construct
  misc_feature 1..80: note = Synthetic: >KF636752_10-cand-300-379
  source 1..80: mol_type = other DNA
tctttcagtggatgctaatgacagcacttacttttactatactatttttacaactgtgggaaatgtccatttttagttgg

SEQ ID NO: 18501 - DNA, 80 bp, synthetic construct
  misc_feature 1..80: note = Synthetic: >KF636752_10-cand-390-469
  source 1..80: mol_type = other DNA
atgctactattccagttgtaatcctacttatgggtgtgtctgcttttgtgactatgttagtcaaacacaagcatgccttt

SEQ ID NO: 18502 - DNA, 80 bp, synthetic construct
  misc_feature 1..80: note = Synthetic: >KF636752_10-cand-480-559
  source 1..80: mol_type = other DNA
tcctgatgccaacattggctgttgtcttttattataattgtatttatgtacctgagcattggctcattgaaatggtcagc

SEQ ID NO: 18503 - DNA, 80 bp, synthetic construct
  misc_feature 1..80: note = Synthetic: >KF636752_10-cand-580-659
  source 1..80: mol_type = other DNA
tacaattcagctgttctacggctattctataagagaacttatcgctctttttgctgtggtcatagctatgagtgtcctgt

SEQ ID NO: 18504 - DNA, 80 bp, synthetic construct
  misc_feature 1..80: note = Synthetic: >KF636752_10-cand-680-759
  source 1..80: mol_type = other DNA
gacaatactagacgagtatggcttgctactaatgtgctcacatggttgtacaggttgtacgctggcacaacagtagagaa

SEQ ID NO: 18505 - DNA, 80 bp, synthetic construct
  misc_feature 1..80: note = Synthetic: >KF636752_10-cand-780-859
  source 1..80: mol_type = other DNA
tccttatgagtctcaccacaaattatagtggttgtgttacagttataatgtttgctgctaaaggtgtcacaacattaatt

SEQ ID NO: 18506 - DNA, 80 bp, synthetic construct
  misc_feature 1..80: note = Synthetic: >KF636752_11-cand-0-79
  source 1..80: mol_type = other DNA
acagatatccattgtctgtgttctctagtgtggatttccttaaacttgctaacatcaaaactatgccatctaccaatgtg

SEQ ID NO: 18507 - DNA, 80 bp, synthetic construct
  misc_feature 1..80: note = Synthetic: >KF636752_11-cand-200-279
  source 1..80: mol_type = other DNA
ggtgatgctacagaagtgtcgaagaagatgcttgatgcttatattgaaaaattcatgagcacgttcggtgtcaccatgga

SEQ ID NO: 18508 - DNA, 80 bp, synthetic construct
  misc_feature 1..80: note = Synthetic: >KF636752_11-cand-290-369
  source 1..80: mol_type = other DNA
acatttgtcagcgcagctaaaaatagtctgaatgacggtgtgcctcttgaaaaagtacttaaagagtttgttgcagcagc

SEQ ID NO: 18509 - DNA, 80 bp, synthetic construct
  misc_feature 1..80: note = Synthetic: >KF636752_11-cand-380-459
  source 1..80: mol_type = other DNA
tgtgctgagactgatgtcgaagctgactctattgttaatgcactgcaactcacttttaaggatgatgttgacatcacaaa

SEQ ID NO: 18510 - DNA, 80 bp, synthetic construct
  misc_feature 1..80: note = Synthetic: >KF636752_11-cand-470-549
  source 1..80: mol_type = other DNA
aatgactttgtacttacttataacaaagttgattctatgactccatacgacttaggtgtgtgtattgaggttggtgctag

SEQ ID NO: 18511 - DNA, 80 bp, synthetic construct
  misc_feature 1..80: note = Synthetic: >KF636752_11-cand-560-639
  source 1..80: mol_type = other DNA
gcaaatgtagcaaaagcaaatgcggctgcactcatttggaacattgaccactacttactgctttccgagtcttttagacg

SEQ ID NO: 18512 - DNA, 80 bp, synthetic construct
  misc_feature 1..80: note = Synthetic: >KF636752_11-cand-650-729
  source 1..80: mol_type = other DNA
tcttcggcgcgtaaaaatggtttgcagtttaaactgacgtgtagcaagaatagacaagttacaccttttcttactacaaa

SEQ ID NO: 18513 - DNA, 80 bp, synthetic construct
  misc_feature 1..80: note = Synthetic: >KF636752_11-cand-740-819
  source 1..80: mol_type = other DNA
agcggtggtgcaacgtatacaacatggctaaaaaggttattaaaggttgcaatggttatgctgcttgtttgctgcatact

SEQ ID NO: 18514 - DNA, 80 bp, synthetic construct
  misc_feature 1..80: note = Synthetic: >KF636752_11-cand-800-879
  source 1..80: mol_type = other DNA
ctgcttgtttgctgcatactctattgtttgcttccatcatttaagtctcaaccactgaatatgtatagtgacgagattat

SEQ ID NO: 18515 - DNA, 80 bp, synthetic construct
  misc_feature 1..80: note = Synthetic: >KF636752_11-cand-890-969
  source 1..80: mol_type = other DNA
gttattgaagatgggtctttgcgtgacataactgcagatgacacttgtttttcaaacaagcatagtagttttgtgtcatg

SEQ ID NO: 18516 - DNA, 80 bp, synthetic construct
  misc_feature 1..80: note = Synthetic: >KF636752_12-cand-10-89
  source 1..80: mol_type = other DNA
aacagtactgaacatgtcgaacaggcagttcagcatctgaacactaaactcacagctgacattatgctgtgtattttcct

SEQ ID NO: 18517 - DNA, 80 bp, synthetic construct
  misc_feature 1..80: note = Synthetic: >KF636752_12-cand-90-169
  source 1..80: mol_type = other DNA
tgtaatatacttgatttgctatttcctacgcactgattctttcattgcggtagtcttcaagtatttagctggccttctaa

SEQ ID NO: 18518 - DNA, 80 bp, synthetic construct
  misc_feature 1..80: note = Synthetic: >KF636752_12-cand-170-249
  source 1..80: mol_type = other DNA
ctggaggctttctttgtctgggattattcctagacacacctacgttgctgcttaaagcaactattggtgtggttctgttt

SEQ ID NO: 18519 - DNA, 80 bp, synthetic construct
  misc_feature 1..80: note = Synthetic: >KF636752_12-cand-250-329
  source 1..80: mol_type = other DNA
atgttttcgcttggattcatttgcagaatcacacttgcaattcgatgcaaatcactagtaccattgtgtgctgatgatga

SEQ ID NO: 18520 - DNA, 80 bp, synthetic construct
  misc_feature 1..80: note = Synthetic: >KF636752_12-cand-330-409
  source 1..80: mol_type = other DNA
ttgcttcgtaaattataatgcaggaggcaaaacttattgtatgccttttgacccaaatgaaccatatctcacacttgtag

SEQ ID NO: 18521 - DNA, 80 bp, synthetic construct
  misc_feature 1..80: note = Synthetic: >KF636752_12-cand-410-489
  source 1..80: mol_type = other DNA
tacaccaaaatggtattacatgtggatcatataaattatatggtgatgtttctattgctgaccgcatttacctagtaaca

SEQ ID NO: 18522 - DNA, 80 bp, synthetic construct
  misc_feature 1..80: note = Synthetic: >KF636752_12-cand-490-569
  source 1..80: mol_type = other DNA
ctcaccaaatctgtaccctattcacttcaaaatatttttgatgctgaattgtgtaccatagctttctatatagctgattg

SEQ ID NO: 18523 - DNA, 80 bp, synthetic construct
  misc_feature 1..80: note = Synthetic: >KF636752_12-cand-570-649
  source 1..80: mol_type = other DNA
tgctgttatagaagaccacacaaccgcagggaaaactcctagactggaactgaaatcagatcctatttatgaggtccctt

SEQ ID NO: 18524 - DNA, 80 bp, synthetic construct
  misc_feature 1..80: note = Synthetic: >KF636752_12-cand-650-729
  source 1..80: mol_type = other DNA
gcgctactattgatgtgcctctctaaggtcacttgaaaggagtctaaacgaacttacgtttggcttttgtcacacgttaa

SEQ ID NO: 18525 - DNA, 80 bp, synthetic construct
  misc_feature 1..80: note = Synthetic: >KF636752_12-cand-730-809
  source 1..80: mol_type = other DNA
atgtactccttcgtctcacaagagacaggcacagtaatagttaacgctgtgtttattcttgtgggttttgtggcattatt

SEQ ID NO: 18526 - DNA, 80 bp, synthetic construct
  misc_feature 1..80: note = Synthetic: >KF636752_12-cand-810-889
  source 1..80: mol_type = other DNA
aatagttgccttagcaatccttacttgtttgcggctgtgtgcatactgctgcaatattcttgatcaaggcgtagttaggc

SEQ ID NO: 18527 - DNA, 80 bp, synthetic construct
  misc_feature 1..80: note = Synthetic: >KF636752_12-cand-890-969
  source 1..80: mol_type = other DNA
ctactcgctacgtctatctacaagctcaaactttctacaataaactacaacctgtggaatctgagctcctagtagtgtaa

SEQ ID NO: 18528 - DNA, 80 bp, synthetic construct
  misc_feature 1..80: note = Synthetic: >KF636752_12-cand-970-1049
  source 1..80: mol_type = other DNA
tctaaacgaacgtttagttattgcacttttattcgtcccgatagctcttgtagccatgtcgggcgatagcaacaacacca

SEQ ID NO: 18529 - DNA, 80 bp, synthetic construct
  misc_feature 1..80: note = Synthetic: >KF636752_12-cand-1050-1129
  source 1..80: mol_type = other DNA
ttacccaggaggaactttttaaagttgtcaaggaatggaatttcgctttaggcattatgctttttatattcatcacactt

SEQ ID NO: 18530 - DNA, 80 bp, synthetic construct
  misc_feature 1..80: note = Synthetic: >KF636752_12-cand-1130-1209
  source 1..80: mol_type = other DNA
ctgcagtatgcttacgctactcgcagtctgggactgtatatactaaagcttgtgcttctttggctcatgtggccactcac

SEQ ID NO: 18531 - DNA, 80 bp, synthetic construct
  misc_feature 1..80: note = Synthetic: >KF636752_12-cand-1210-1289
  source 1..80: mol_type = other DNA
ttttgcatgctttgtgcttgctgccatttaccacgtgaacgttgtgttcatgggatttgccatcacatttgctattattg

SEQ ID NO: 18532 - DNA, 80 bp, synthetic construct
  misc_feature 1..80: note = Synthetic: >KF636752_12-cand-1290-1369
  source 1..80: mol_type = other DNA
ttgggtgcatgtggcttggttactggattgcctcaatccgtctgttcagaagaactggttctgtttggtctttcaatcca

SEQ ID NO: 18533 - DNA, 80 bp, synthetic construct
  misc_feature 1..80: note = Synthetic: >KF636752_12-cand-1370-1449
  source 1..80: mol_type = other DNA
gaaaccaacagactgctgaacgtagcgattcgtggaaccatgtacaccagaccactgcaggaagacactgctgtgattgt

SEQ ID NO: 18534 - DNA, 80 bp, synthetic construct
  misc_feature 1..80: note = Synthetic: >KF636752_12-cand-1450-1529
  source 1..80: mol_type = other DNA
agctacagttgctcgtggagtagctgtatttgcaggacacaaacttggaagagctgaccttgagtcattgcctaacgaaa

SEQ ID NO: 18535 - DNA, 80 bp, synthetic construct
  misc_feature 1..80: note = Synthetic: >KF636752_12-cand-1530-1609
  source 1..80: mol_type = other DNA
ttactgtagccacctccagaacgctttcctattttaagatgagtaggaaagtaaatattggtgttggctcgggtgttgcg

SEQ ID NO: 18536 - DNA, 80 bp, synthetic construct
  misc_feature 1..80: note = Synthetic: >KF636752_12-cand-1610-1689
  source 1..80: mol_type = other DNA
acctatttgcgttacaaagtgggaaaccaccgagtgccaaatgctcgcgcatctgaagatcaagaagatctgctagttgt

SEQ ID NO: 18537 - DNA, 80 bp, synthetic construct
  misc_feature 1..80: note = Synthetic: >KF636752_12-cand-1690-1769
  source 1..80: mol_type = other DNA
atcgtaagagatcacgaacagaatgaattttaagagtatatatgaagtaatcactttgctctttacatatatagtctttg

SEQ ID NO: 18538 - DNA, 80 bp, synthetic construct
  misc_feature 1..80: note = Synthetic: >KF636752_12-cand-1770-1849
  source 1..80: mol_type = other DNA
tgactgttgttatcaccaacaattcacagaaattacttgaatgctgtttgagattaattagaaaaatccaatctgtaaaa

SEQ ID NO: 18539 - DNA, 80 bp, synthetic construct
  misc_feature 1..80: note = Synthetic: >KF636752_12-cand-1850-1929
  source 1..80: mol_type = other DNA
catgagaaacaaaataccagatgtcttaacacctggcatttagtgtcatcagaacatggaatagaggatttacctgtata

SEQ ID NO: 18540 - DNA, 80 bp, synthetic construct
  misc_feature 1..80: note = Synthetic: >KF636752_12-cand-1930-2009
  source 1..80: mol_type = other DNA
acgtgcaaaacaacgaactatgagatatcttttcctcatagtagctatctgtactggtttaacagcgaaacctgttacct

SEQ ID NO: 18541 - DNA, 80 bp, synthetic construct
  misc_feature 1..80: note = Synthetic: >KF636752_12-cand-2010-2089
  source 1..80: mol_type = other DNA
tcacccacaaccacggacgacatagagttgtagtggttgattggacagatagcacaacacttattcttaatcacgttgat

SEQ ID NO: 18542 - DNA, 80 bp, synthetic construct
  misc_feature 1..80: note = Synthetic: >KF636752_12-cand-2090-2169
  source 1..80: mol_type = other DNA
gaaccaataacatcatcaacggctaatcggcattgctgcaattacaaagtaggattttgtacacacattgttgtggaagc

SEQ ID NO: 18543 - DNA, 80 bp, synthetic construct
  misc_feature 1..80: note = Synthetic: >KF636752_12-cand-2170-2249
  source 1..80: mol_type = other DNA
ttactctactatttcagtacgtcgtataccattagacccaaagaatttttgtgcttggcattacgcaccttgtacacaca

SEQ ID NO: 18544 - DNA, 80 bp, synthetic construct
  misc_feature 1..80: note = Synthetic: >KF636752_12-cand-2250-2329
  source 1..80: mol_type = other DNA
accctcatattgtttgtgtttaatcagattaattttactaaatctaaaattaaaataaacgaactattctctcacatcct

SEQ ID NO: 18545 - DNA, 80 bp, synthetic construct
  misc_feature 1..80: note = Synthetic: >KF636752_12-cand-2330-2409
  source 1..80: mol_type = other DNA
aaatggctgctgaggggcaaagagtcacttttttgactcaaggttcaaaccaaaataacaacaaccaggaaaaccaagat

SEQ ID NO: 18546 - DNA, 80 bp, synthetic construct
  misc_feature 1..80: note = Synthetic: >KF636752_12-cand-2410-2489
  source 1..80: mol_type = other DNA
ggacgtggcgctagacccaaaactagaaagcctcgtccagctccacaaaataacgtatcttggtttacgcctcttaccca

SEQ ID NO: 18547 - DNA, 80 bp, synthetic construct
  misc_feature 1..80: note = Synthetic: >KF636752_12-cand-2490-2569
  source 1..80: mol_type = other DNA
acatggaaaacaagcgcttacttttaacccaggacaaggagtgccgctcaacgcaaatgacgatcctgacagccgcatcg

SEQ ID NO: 18548 - DNA, 80 bp, synthetic construct
  misc_feature 1..80: note = Synthetic: >KF636752_12-cand-2570-2649
  source 1..80: mol_type = other DNA
gctactggcgtcgcaacattcgcacagttacaaagaacggcaaaccacagaaattggacccgcgctggtacttttactat

SEQ ID NO: 18549 - DNA, 80 bp, synthetic construct
  misc_feature 1..80: note = Synthetic: >KF636752_12-cand-2650-2729
  source 1..80: mol_type = other DNA
cttggcacaggccctgagcaaaacctcaagtacctccagcaaaaggacggaattgtctgggttgcagctcacggtgccct

SEQ ID NO: 18550 - DNA, 80 bp, synthetic construct
  misc_feature 1..80: note = Synthetic: >KF636752_12-cand-2730-2809
  source 1..80: mol_type = other DNA
taatgttccagttaaaacagttgggaccagaaatccagcaaacgatcaagctatcgttgctgcatttgcgccaggtaccg

SEQ ID NO: 18551 - DNA, 80 bp, synthetic construct
  misc_feature 1..80: note = Synthetic: >KF636752_12-cand-2810-2889
  source 1..80: mol_type = other DNA
aactgcccaagggtttctatgttgaaggtagcagatctacatcatccgcttcttcagcagcgtcttcaagatcaaattcg

SEQ ID NO: 18552 - DNA, 80 bp, synthetic construct
  misc_feature 1..80: note = Synthetic: >KF636752_12-cand-2890-2969
  source 1..80: mol_type = other DNA
cgcagcagaaactctagcctctctcgcagctcttctcccggacgaggattgccaccagcaaccgaccctaacggagttct

SEQ ID NO: 18553 - DNA, 80 bp, synthetic construct
  misc_feature 1..80: note = Synthetic: >KF636752_12-cand-2970-3049
  source 1..80: mol_type = other DNA
agctgccttgctcctgactaaattggaagcgcttgatgcaaaagtaaatggcccaaaacaacccccagttgtcacaaaga

SEQ ID NO: 18554 - DNA, 80 bp, synthetic construct
  misc_feature 1..80: note = Synthetic: >KF636752_12-cand-3050-3129
  source 1..80: mol_type = other DNA
aaacagcagctgaaattgctgccaaacctaggcagaaacgcgtagcccataaaggttacaatgtaaatgctgcctatgga

SEQ ID NO: 18555 - DNA, 80 bp, synthetic construct
  misc_feature 1..80: note = Synthetic: >KF636752_12-cand-3130-3209
  source 1..80: mol_type = other DNA
cgccgaggcccaggaccataccagggtaatttcggcacacaagaattcaacaaattgggaacagactatccaaaatggcc

SEQ ID NO: 18556 - DNA, 80 bp, synthetic construct
  misc_feature 1..80: note = Synthetic: >KF636752_13-cand-0-79
  source 1..80: mol_type = other DNA
tcggttacaccggctgaggccttgaacactgtatatgctgccattgctgaaggcaaggctgcatttatcccaccattcaa

SEQ ID NO: 18557 - DNA, 80 bp, synthetic construct
  misc_feature 1..80: note = Synthetic: >KF636752_13-cand-80-159
  source 1..80: mol_type = other DNA
ggggatgcataagtatctccctgaattgtgtgtctttctagtgagaaaccatgggaacccaacacgcccttttgacctgc

SEQ ID NO: 18558 - DNA, 80 bp, synthetic construct
  misc_feature 1..80: note = Synthetic: >KF636752_13-cand-160-239
  source 1..80: mol_type = other DNA
aagaacttgctgtccgcgaaggtgacgtgaactatggtcgctcaggtgaaacagtaggcgcaattgtaccgcttgatgga

SEQ ID NO: 18559 - DNA, 80 bp, synthetic construct
  misc_feature 1..80: note = Synthetic: >KF636752_13-cand-240-319
  source 1..80: mol_type = other DNA
caggagccctacggaactataacaatccaactccgcagacgcgggaaaaatgcgggtggagtctatgcctggactaacac

SEQ ID NO: 18560 - DNA, 80 bp, synthetic construct
  misc_feature 1..80: note = Synthetic: >KF636752_13-cand-320-399
  source 1..80: mol_type = other DNA
ccgtgatacggttacagatgatttggttcatgaaccaatcgatctgtatactgaagatcctaaagggaaacatgcccagg

SEQ ID NO: 18561 - DNA, 80 bp, synthetic construct
  misc_feature 1..80: note = Synthetic: >KF636752_13-cand-400-479
  source 1..80: mol_type = other DNA
gaaacctgcgcaaattccttactggcggtaacgatttccatcgttacgtcgataactactattgcactggagacgggaaa

SEQ ID NO: 18562 - DNA, 80 bp, synthetic construct
  misc_feature 1..80: note = Synthetic: >KF636752_13-cand-480-559
  source 1..80: mol_type = other DNA
ccgctgccatgcatagtgactttgctcgagaaggctggccatgccaataagcctctcgacgacgctatggactatctccg

SEQ ID NO: 18563 - DNA, 80 bp, synthetic construct
  misc_feature 1..80: note = Synthetic: >KF636752_13-cand-560-639
  source 1..80: mol_type = other DNA
aggcttgaaccgtatgggacaaccttgtagagaccatgaccatgagcgtgtttgggaagtggagcgcgataatgctcctt

SEQ ID NO: 18564 - DNA, 80 bp, synthetic construct
  misc_feature 1..80: note = Synthetic: >KF636752_13-cand-640-719
  source 1..80: mol_type = other DNA
atcctgaacaatctctcttctcaatcagtgctatcaagaccttgggtgaaataccccactgtgtctttgcacctgattgt

SEQ ID NO: 18565 - DNA, 80 bp, synthetic construct
  misc_feature 1..80: note = Synthetic: >KF636752_13-cand-720-799
  source 1..80: mol_type = other DNA
gccgtcaaagtaatgaaacctcgcaaggtcaaacgcggggctgacggctttatgacgaaactcagaagagtgtacaatat

SEQ ID NO: 18566 - DNA, 80 bp, synthetic construct
  misc_feature 1..80: note = Synthetic: >KF636752_13-cand-800-879
  source 1..80: mol_type = other DNA
caatggctttgatgaagtcaagccaatggcgctctgtgcactccattactgtgaggattgtggcatggaaatgtggtgtc

SEQ ID NO: 18567 - DNA, 80 bp, synthetic construct
  misc_feature 1..80: note = Synthetic: >KF636752_13-cand-880-959
  source 1..80: mol_type = other DNA
actcaaattttgaggaagcctactgtccatgtggtaaaatttacaccaacacaccttgcacactaacttcagctggttat

SEQ ID NO: 18568 - DNA, 80 bp, synthetic construct
  misc_feature 1..80: note = Synthetic: >KF636752_13-cand-960-1039
  source 1..80: mol_type = other DNA
gttgttgaaggttcagttgttgctatgccgtgcgatgcatgtaagagcgatagcgaccattctaatgggaccttctatga

SEQ ID NO: 18569 - DNA, 80 bp, synthetic construct
  misc_feature 1..80: note = Synthetic: >KF636752_13-cand-1040-1119
  source 1..80: mol_type = other DNA
cagctgtaagtatcttgctgaagacaaagcagaacctggtaatagggaaaactttgtctattttggaggatgttgctttg

SEQ ID NO: 18570 - DNA, 80 bp, synthetic construct
  misc_feature 1..80: note = Synthetic: >KF636752_13-cand-1120-1199
  source 1..80: mol_type = other DNA
cctatgttggctgccgcaatggtaatgccatctgggtacccagagcacattcagatattggtaacaatcactcaggcatt

SEQ ID NO: 18571 - DNA, 80 bp, synthetic construct
  misc_feature 1..80: note = Synthetic: >KF636752_13-cand-1200-1279
  source 1..80: mol_type = other DNA
gttggagctgatgttgctttgcttaatgatgacctcaaggccattgttgctcaagaggttatacctgttgtgatccctga

SEQ ID NO: 18572 - DNA, 80 bp, synthetic construct
  misc_feature 1..80: note = Synthetic: >KF636752_13-cand-1280-1359
  source 1..80: mol_type = other DNA
agactttaaggtcaatgagactgtggttgctcttgtagcagcagtttcaggttcagtggaccagttcattaagaactgta

SEQ ID NO: 18573 - DNA, 80 bp, synthetic construct
  misc_feature 1..80: note = Synthetic: >KF636752_13-cand-1360-1439
  source 1..80: mol_type = other DNA
aaggactgacagctgaaaccttcaagtgtttgcttgaagcttctggcaaattcagagtcactgttgatcatgttattgac

SEQ ID NO: 18574 - DNA, 80 bp, synthetic construct
  misc_feature 1..80: note = Synthetic: >KF636752_13-cand-1440-1519
  source 1..80: mol_type = other DNA
ggttgtatttgtgttgctacagatagcgccgttacggcccttgaaccagcattggctttttgtactgctgccaatatcat

SEQ ID NO: 18575 - DNA, 80 bp, synthetic construct
  misc_feature 1..80: note = Synthetic: >KF636752_13-cand-1520-1599
  source 1..80: mol_type = other DNA
gtaccgcacccttgtggctacatctgttgtcatcagtgctcatactttagatgctttggctcaacgtgtgcgtgatgctt

SEQ ID NO: 18576 - DNA, 80 bp, synthetic construct
  misc_feature 1..80: note = Synthetic: >KF636752_13-cand-1600-1679
  source 1..80: mol_type = other DNA
gtaaacacgtgcaccctcaggctatgcgtcttcttaatactcttaatgagtatgtggattacagcactaactccacactt

SEQ ID NO: 18577 - DNA, 80 bp, synthetic construct
  misc_feature 1..80: note = Synthetic: >KF636752_13-cand-1680-1759
  source 1..80: mol_type = other DNA
gtactgtgccatgacgtcattaatttgccaattgtgcttggtgatatcctggacagacttttctgtggatgcaaaaagat

SEQ ID NO: 18578 - DNA, 80 bp, synthetic construct
  misc_feature 1..80: note = Synthetic: >KF636752_13-cand-1760-1839
  source 1..80: mol_type = other DNA
tgtcgagtctgtcacaacatggctctacaactttagcatctctactattgacacaatatttgaccttaaggcttttatta

SEQ ID NO: 18579 - DNA, 80 bp, synthetic construct
  misc_feature 1..80: note = Synthetic: >KF636752_13-cand-1840-1919
  source 1..80: mol_type = other DNA
gtcttattgtacgtaataagtacaagtttgtcaagggtaagtttgtgttacttgctaaaaatgtcagttctgtagtgcaa

SEQ ID NO: 18580 - DNA, 80 bp, synthetic construct
  misc_feature 1..80: note = Synthetic: >KF636752_13-cand-1920-1999
  source 1..80: mol_type = other DNA
tctgttgttgcctacctaaacaatgttatctcagctttttaccaacaagtgcagtttgctggcacctacgtaggagcctt

SEQ ID NO: 18581 - DNA, 80 bp, synthetic construct
  misc_feature 1..80: note = Synthetic: >KF636752_13-cand-2000-2079
  source 1..80: mol_type = other DNA
tgaaattcatcaaacgttacttgagctgggtggtgctatctacacgcgtgtgcaggttgcagcaaacagtattcaagacc

SEQ ID NO: 18582 - DNA, 80 bp, synthetic construct
  misc_feature 1..80: note = Synthetic: >KF636752_13-cand-2080-2159
  source 1..80: mol_type = other DNA
ttgttttgccttctacagtgtccaaaaaggaattaacctttgtggatggacatgctattgacacagaattgacttctgaa

SEQ ID NO: 18583 - DNA, 80 bp, synthetic construct
  misc_feature 1..80: note = Synthetic: >KF636752_13-cand-2160-2239
  source 1..80: mol_type = other DNA
gaagttactgtgttggaaggtatagttgaacaacttgacactgataccaataagattgctggtgacagtatcaagggtga

SEQ ID NO: 18584 - DNA, 80 bp, synthetic construct
  misc_feature 1..80: note = Synthetic: >KF636752_13-cand-2240-2319
  source 1..80: mol_type = other DNA
tttagtcacggtgaataattgtgttttcgtacgctttggcgatggaaacctttcaccggctactactgactgtcaagcca

SEQ ID NO: 18585 - DNA, 80 bp, synthetic construct
  misc_feature 1..80: note = Synthetic: >KF636752_13-cand-2320-2399
  source 1..80: mol_type = other DNA
caaaaggagtttttaaactcaaaggtggcaaccctgacaaggttaaaaccgtgaccttcggtgaaaacgaggtcaaggaa

SEQ ID NO: 18586 - DNA, 80 bp, synthetic construct
  misc_feature 1..80: note = Synthetic: >KF636752_13-cand-2400-2479
  source 1..80: mol_type = other DNA
atcactccatatattacagtgaatgtgaagtacaccgttcatgaccttcttgataagattctcaatgtgcggcttccatc

SEQ ID NO: 18587 - DNA, 80 bp, synthetic construct
  misc_feature 1..80: note = Synthetic: >KF636752_13-cand-2480-2559
  source 1..80: mol_type = other DNA
atttactgttgaaaagggcttaacgctccaagaacttactgcagttgttgaagacgcagttgtcacacaattggaagcta

SEQ ID NO: 18588 - DNA, 80 bp, synthetic construct
  misc_feature 1..80: note = Synthetic: >KF636752_13-cand-2560-2639
  source 1..80: mol_type = other DNA
tgcgtgctatcctacttgaagcgggtgtcgacattgatattgacgatcttattgactcgccatattatatgtttgacaac

SEQ ID NO: 18589 - DNA, 80 bp, synthetic construct
  misc_feature 1..80: note = Synthetic: >KF636752_13-cand-2640-2719
  source 1..80: mol_type = other DNA
gcaggtgactctgttattggacctgtgatgtacttttccaaccaacagcccgttgactcagatgagttgacaacggcatc

SEQ ID NO: 18590 - DNA, 80 bp, synthetic construct
  misc_feature 1..80: note = Synthetic: >KF636752_13-cand-2720-2799
  source 1..80: mol_type = other DNA
agagactgaagaagtagtcgaagatgctaaacatgctgcaactaaacgttcaagtcaagattggcttgacgatagttgtt

SEQ ID NO: 18591 - DNA, 80 bp, synthetic construct
  misc_feature 1..80: note = Synthetic: >KF636752_13-cand-2800-2879
  source 1..80: mol_type = other DNA
ctgaagacgattgtgaagaggaagacgcagtcactgaagctgaaagcgctgctgatagtgcaccagcgttggttgtggtt

SEQ ID NO: 18592 - DNA, 80 bp, synthetic construct
  misc_feature 1..80: note = Synthetic: >KF636752_13-cand-2880-2959
  source 1..80: mol_type = other DNA
atagaggaacctaagtctactgtttcgtcagttagcgaggaaccaaagtttcccttacctgaacagtgttctgttgaaac

SEQ ID NO: 18593 - DNA, 80 bp, synthetic construct
  misc_feature 1..80: note = Synthetic: >KF636752_13-cand-2960-3039
  source 1..80: mol_type = other DNA
ccacatagtcgtggatgacacaaatagcaaacgcctcttatggtcggacatggttgaagcaacttgtgggtctgccactg

SEQ ID NO: 18594 - DNA, 80 bp, synthetic construct
  misc_feature 1..80: note = Synthetic: >KF636752_13-cand-3040-3119
  source 1..80: mol_type = other DNA
atggaaacgaaggaactgtgggtgaggttgacacgtgtgcggtagctgtaaatcgtgacaacactccatcaacgcagtcc

SEQ ID NO: 18595 - DNA, 80 bp, synthetic construct
  misc_feature 1..80: note = Synthetic: >KF636752_13-cand-3120-3199
  source 1..80: mol_type = other DNA
atcgtaaccgtttctccacagagagaagtgcatcactatgtcgtaactgaagagaagtgggacgaacacgtgtgcggtag

SEQ ID NO: 18596 - DNA, 80 bp, synthetic construct
  misc_feature 1..80: note = Synthetic: >KF636752_13-cand-3200-3279
  source 1..80: mol_type = other DNA
ctgtaaaccgtgtgaaatccccttgagcgtaaaagctaagcgtgtgaaccaaaattctgtaaattgtggtgaaaaggctg

SEQ ID NO: 18597 - DNA, 80 bp, synthetic construct
  misc_feature 1..80: note = Synthetic: >KF636752_13-cand-3280-3359
  source 1..80: mol_type = other DNA
tcgttacagttaactccactacagttttcaacacgcctgttccacgtgaagtggaagccaaaacggcgaatgaacaacct

SEQ ID NO: 18598 - DNA, 80 bp, synthetic construct
  misc_feature 1..80: note = Synthetic: >KF636752_13-cand-3360-3439
  source 1..80: mol_type = other DNA
aaggttgatagtactactgtagctaaagtcactcgtacaaagagtgggcacagtcaggaattcaaacccaaaggttacac

SEQ ID NO: 18599 - DNA, 80 bp, synthetic construct
  misc_feature 1..80: note = Synthetic: >KF636752_13-cand-3440-3519
  source 1..80: mol_type = other DNA
caagcttaccgacaatgtgtacattaagtgtgccgacattgttgaggaagctcgcaatacaaaaccacctattcttgtaa

SEQ ID NO: 18600 - DNA, 80 bp, synthetic construct
  misc_feature 1..80: note = Synthetic: >KF636752_14-cand-0-79
  source 1..80: mol_type = other DNA
gaagacagtctatgttgttgtcaacgacaagactattttcgatgcatgttgtagccacattaataacaaggatgtcaaaa

SEQ ID NO: 18601 - DNA, 80 bp, synthetic construct
  misc_feature 1..80: note = Synthetic: >KF636752_14-cand-80-159
  source 1..80: mol_type = other DNA
caccatctaagcctgtttacatgatgggcgaagtagaagtgttttgtagtactaaagttgcatattgcaaccaggataaa

SEQ ID NO: 18602 - DNA, 80 bp, synthetic construct
  misc_feature 1..80: note = Synthetic: >KF636752_14-cand-160-239
  source 1..80: mol_type = other DNA
gaattttgtcctggtacatctaccttatttaaacctgagcagcttgatgagattagacttaagttgccagaagactttct

SEQ ID NO: 18603 - DNA, 80 bp, synthetic construct
  misc_feature 1..80: note = Synthetic: >KF636752_14-cand-240-319
  source 1..80: mol_type = other DNA
gattggagattgccacaaagtggatgatgtctacgttttgtgcatacctgaccgtagaaagggacaagaccttacaggtt

SEQ ID NO: 18604 - DNA, 80 bp, synthetic construct
  misc_feature 1..80: note = Synthetic: >KF636752_14-cand-320-399
  source 1..80: mol_type = other DNA
ttaagggtcttaaacaattaaagaaagtcactgccgcttcatgtctaccaggacagggaaaatttggctttactatacag

SEQ ID NO: 18605 - DNA, 80 bp, synthetic construct
  misc_feature 1..80: note = Synthetic: >KF636752_14-cand-400-479
  source 1..80: mol_type = other DNA
gatgtgacgccacttatgacggcatgtcctgatatttaccttgtcaaaactagtgttgacaatgatgttcaattgttgtg

SEQ ID NO: 18606 - DNA, 80 bp, synthetic construct
  misc_feature 1..80: note = Synthetic: >KF636752_14-cand-480-559
  source 1..80: mol_type = other DNA
tccgacagtgacatacaatgttaaacaaatgttggcacgcgctaagcaagaaaaattgcttatgtgtgtcaatattgaca

SEQ ID NO: 18607 - DNA, 80 bp, synthetic construct
  misc_feature 1..80: note = Synthetic: >KF636752_14-cand-560-639
  source 1..80: mol_type = other DNA
acaagtcttttaccaggaacgttgttcatttggcaaaaaattttcaacacaaaccaggctgtcaaactgtggacggctat

SEQ ID NO: 18608 - DNA, 80 bp, synthetic construct
  misc_feature 1..80: note = Synthetic: >KF636752_14-cand-640-719
  source 1..80: mol_type = other DNA
gagttttactgttacactgagaaacaaccattgagttctatcattgatgaacttaatgcgttgggcaaggacatcataac

SEQ ID NO: 18609 - DNA, 80 bp, synthetic construct
  misc_feature 1..80: note = Synthetic: >KF636752_14-cand-720-799
  source 1..80: mol_type = other DNA
aacgccattaggttgtattacacaccaattatccttaccagagtcagcagcaaaaatgcgtgctctgaagtgcaaatttc

SEQ ID NO: 18610 - DNA, 80 bp, synthetic construct
  misc_feature 1..80: note = Synthetic: >KF636752_14-cand-810-889
  source 1..80: mol_type = other DNA
tacttcgccaggtgctgaaaagcaattctgtgctgcattcacagctgcctctagctctacagaagaagagttatttatgg

SEQ ID NO: 18611 - DNA, 80 bp, synthetic construct
  misc_feature 1..80: note = Synthetic: >KF636752_14-cand-890-969
  source 1..80: mol_type = other DNA
cagattgtgtttctaacggttcctacatggattggatcgttataaacaaagccgatggtgacacaattcatttccttcag

SEQ ID NO: 18612 - DNA, 80 bp, synthetic construct
  misc_feature 1..80: note = Synthetic: >KF636752_14-cand-970-1049
  source 1..80: mol_type = other DNA
agggatgaagacatcatcgattatcacacaagcactaacaagttcagtatgagtggtgttagtgggcttgtgtttaaaga

SEQ ID NO: 18613 - DNA, 80 bp, synthetic construct
  misc_feature 1..80: note = Synthetic: >KF636752_14-cand-1050-1129
  source 1..80: mol_type = other DNA
tgtgaagatactcaagcggtatctcgaaaaaactaagcctatgctgaaagaggttaccgtctatacaactgtagacggta

SEQ ID NO: 18614 - DNA, 80 bp, synthetic construct
  misc_feature 1..80: note = Synthetic: >KF636752_14-cand-1130-1209
  source 1..80: mol_type = other DNA
ctaatgttaacaccaagattttgatttgttctaaatcttttggcagccagctaggcacatgttacattgatggagaggac

SEQ ID NO: 18615 - DNA, 80 bp, synthetic construct
  misc_feature 1..80: note = Synthetic: >KF636752_14-cand-1210-1289
  source 1..80: mol_type = other DNA
gttacaagtgtcttccctacaaaacaacatgaaggtaagattgtcaacataactcaagttgacgatgttactagtagtca

SEQ ID NO: 18616 - DNA, 80 bp, synthetic construct
  misc_feature 1..80: note = Synthetic: >KF636752_14-cand-1290-1369
  source 1..80: mol_type = other DNA
ggttaaagaatactatggtgttgaagacactagtttcctgactcgttataactcagccttgatgcatgtcaatcgctggt

SEQ ID NO: 18617 - DNA, 80 bp, synthetic construct
  misc_feature 1..80: note = Synthetic: >KF636752_14-cand-1370-1449
  source 1..80: mol_type = other DNA
cgtttgcagaagtacctagtacaggtattttctgcattaaatgggtggctaacaattgctatcttaatgctgcgatactc

SEQ ID NO: 18618 - DNA, 80 bp, synthetic construct
  misc_feature 1..80: note = Synthetic: >KF636752_14-cand-1460-1539
  source 1..80: mol_type = other DNA
agctcaatgtcgaatacgagacacctgctgtgcgtgaagcggcttttgaaatgcgtgctggcaaacctcaacggtttgtg

SEQ ID NO: 18619 - DNA, 80 bp, synthetic construct
  misc_feature 1..80: note = Synthetic: >KF636752_14-cand-1540-1619
  source 1..80: mol_type = other DNA
gcactcatgattgcttacttaaaggctaccattggtcacactggtgatgctagagaagcagttagaactatgctttcaca

SEQ ID NO: 18620 - DNA, 80 bp, synthetic construct
  misc_feature 1..80: note = Synthetic: >KF636752_14-cand-1620-1699
  source 1..80: mol_type = other DNA
tgccaaagtgcaaggtgaaaggcattttgttatgatgtgcaaaaagtgtgggattagacgtagtcagtttcacggtcttg

SEQ ID NO: 18621 - DNA, 80 bp, synthetic construct
  misc_feature 1..80: note = Synthetic: >KF636752_14-cand-1700-1779
  source 1..80: mol_type = other DNA
atgcagtcatgtgtttcacaaccaacacacaactaagtgatttccttagtggtgacgaagctggttgcacttgtggtgat

SEQ ID NO: 18622 - DNA, 80 bp, synthetic construct
  misc_feature 1..80: note = Synthetic: >KF636752_14-cand-1780-1859
  source 1..80: mol_type = other DNA
attgtgcctgtgtatcagacacatatcagagtaccctttttgattctttcaaccacagagcccaaaatgcaaatgcttaa

SEQ ID NO: 18623 - DNA, 80 bp, synthetic construct
  misc_feature 1..80: note = Synthetic: >KF636752_14-cand-1860-1939
  source 1..80: mol_type = other DNA
ctgtgaagacactaagtttctttgcgctaataattacatgggcaccttaagtagtggacactacacccatgttttcaaca

SEQ ID NO: 18624 - DNA, 80 bp, synthetic construct
  misc_feature 1..80: note = Synthetic: >KF636752_14-cand-1950-2029
  source 1..80: mol_type = other DNA
gtacagtgtaaacggtacacgagtaacaaaaatgtcagaaacaacaacagctgttgctgacgctgtgtataaagacataa

SEQ ID NO: 18625 - DNA, 80 bp, synthetic construct
  misc_feature 1..80: note = Synthetic: >KF636752_14-cand-2040-2119
  source 1..80: mol_type = other DNA
tgaagaccaattcgtcacatacagactggatggtgtttggtgtcatgaaaagaatccagacttgagcgtgtattacaaat

SEQ ID NO: 18626 - DNA, 80 bp, synthetic construct
  misc_feature 1..80: note = Synthetic: >KF636752_14-cand-2130-2209
  source 1..80: mol_type = other DNA
ttattacacatcagcacctatagacttgactcctacagagccattgtctggtgctgaatacgacaatttccatcttaaac

SEQ ID NO: 18627 - DNA, 80 bp, synthetic construct
  misc_feature 1..80: note = Synthetic: >KF636752_14-cand-2210-2289
  source 1..80: mol_type = other DNA
ttgttgggacacttgatgacaacaaagttaagtttgtgcaagagtttaatcacatggtcaaatatgacaaaaccaagcct

SEQ ID NO: 18628 - DNA, 80 bp, synthetic construct
  misc_feature 1..80: note = Synthetic: >KF636752_14-cand-2290-2369
  source 1..80: mol_type = other DNA
acgagacctgttactatatctttctatcctgagatggaaggtgatgttgtagcactatctgcggataagttgcaacaaca

SEQ ID NO: 18629 - DNA, 80 bp, synthetic construct
  misc_feature 1..80: note = Synthetic: >KF636752_14-cand-2380-2459
  source 1..80: mol_type = other DNA
ggggcaaaatttggttccaaatttatagtttggcacacaggttacaaaatcactagagatcttgtcaagccaaacatggc

SEQ ID NO: 18630 - DNA, 80 bp, synthetic construct
  misc_feature 1..80: note = Synthetic: >KF636752_14-cand-2460-2539
  source 1..80: mol_type = other DNA
agctatgcgctgtataaccacctctaaacctgtgactacacaaaactcgtttcaagctctttctgttgaacctcttccag

SEQ ID NO: 18631 - DNA, 80 bp, synthetic construct
  misc_feature 1..80: note = Synthetic: >KF636752_14-cand-2540-2619
  source 1..80: mol_type = other DNA
agacaaaacatagcgagcatgaattagccacagaacaaaaaccaatcctgaaactcaggacagagaaaccagttgttacg

SEQ ID NO: 18632 - DNA, 80 bp, synthetic construct
  misc_feature 1..80: note = Synthetic: >KF636752_14-cand-2630-2709
  source 1..80: mol_type = other DNA
caataattcctgctcccaaaaacgctgatgctcctgttttaattgaatccttgactactgatgatgcgctagctatgtat

SEQ ID NO: 18633 - DNA, 80 bp, synthetic construct
  misc_feature 1..80: note = Synthetic: >KF636752_14-cand-2710-2789
  source 1..80: mol_type = other DNA
gtcaagggtactcgagattttgttgttaataaggctaacagcctgtctaagctgtttggtattaacacaattgaacagaa

SEQ ID NO: 18634 - DNA, 80 bp, synthetic construct
  misc_feature 1..80: note = Synthetic: >KF636752_14-cand-2790-2869
  source 1..80: mol_type = other DNA
tggtgtcgatgcgctaaatatgtgctacgacaggctagctgtctttgactatgtcaaaccatttttaacagttactaaaa

SEQ ID NO: 18635 - DNA, 80 bp, synthetic construct
  misc_feature 1..80: note = Synthetic: >KF636752_14-cand-2870-2949
  source 1..80: mol_type = other DNA
ctgctagtgatgtgacaatcaaagcaggaaaagtagcatgctcactattgcaaagaacagtaccactgttatatgcttta

SEQ ID NO: 18636 - DNA, 80 bp, synthetic construct
  misc_feature 1..80: note = Synthetic: >KF636752_14-cand-2950-3029
  source 1..80: mol_type = other DNA
gtagtgtcttatttagtacccttgttcacaagaacaaaacaacgtgtgtcagttaaagtccctatggtcttaactaaaaa

SEQ ID NO: 18637 - DNA, 80 bp, synthetic construct
  misc_feature 1..80: note = Synthetic: >KF636752_14-cand-3030-3109
  source 1..80: mol_type = other DNA
cacatgcagaagtgtctttggtttattgatgaatggagttgctaattacttcacgtcacccaaattcaagtcttgtgtaa

SEQ ID NO: 18638 - DNA, 80 bp, synthetic construct
  misc_feature 1..80: note = Synthetic: >KF636752_14-cand-3110-3189
  source 1..80: mol_type = other DNA
gagtctttgcattggcaacatgcatagcagcgattctatatatggctatgtttgtatatttgttctttgacatatggcta

SEQ ID NO: 18639 - DNA, 80 bp, synthetic construct
  misc_feature 1..80: note = Synthetic: >KF636752_14-cand-3190-3269
  source 1..80: mol_type = other DNA
tcaaaagctaacgtgtggacagatgtgcaaacactgaaagataattttggtcttggaacggtttgtgataaattccagac

SEQ ID NO: 18640 - DNA, 80 bp, synthetic construct
  misc_feature 1..80: note = Synthetic: >KF636752_14-cand-3270-3349
  source 1..80: mol_type = other DNA
agcttataataactctggtatttatgatgccaccgagtattgtactggtaagagttttatgtgtagtctgtgtctgcgtg

SEQ ID NO: 18641 - DNA, 80 bp, synthetic construct
  misc_feature 1..80: note = Synthetic: >KF636752_14-cand-3350-3429
  source 1..80: mol_type = other DNA
gcatggatagtctcaacttttacacagaattgtctacatcccaaaagacggtctcatggtcttcttttgattttagtaac

SEQ ID NO: 18642 - DNA, 80 bp, synthetic construct
  misc_feature 1..80: note = Synthetic: >KF636752_14-cand-3430-3509
  source 1..80: mol_type = other DNA
attaacactgcggctgaatggtgtttggcgtatttgctttacactaagatgtttgtggttttgttggcgactgcaatctt

SEQ ID NO: 18643 - DNA, 80 bp, synthetic construct
  misc_feature 1..80: note = Synthetic: >KF636752_14-cand-3510-3589
  source 1..80: mol_type = other DNA
ccaatggtttgctgtctattttggcctctacctcacacaatctagttggttgatgtggactatggttagagtcatcagtc

SEQ ID NO: 18644 - DNA, 80 bp, synthetic construct
  misc_feature 1..80: note = Synthetic: >KF636752_14-cand-3590-3669
  source 1..80: mol_type = other DNA
ttgttcctacgagcattcttgttcgtatgtatatttattgtgcatccttttactttgtctacagagcttatgttcacgtc

SEQ ID NO: 18645 - DNA, 80 bp, synthetic construct
  misc_feature 1..80: note = Synthetic: >KF636752_15-cand-40-119
  source 1..80: mol_type = other DNA
tcctacaacagatgatacggctgcctattctaattgtctaaggttatcaccacaatggcacattggtttgtccaatttga

SEQ ID NO: 18646 - DNA, 80 bp, synthetic construct
  misc_feature 1..80: note = Synthetic: >KF636752_15-cand-120-199
  source 1..80: mol_type = other DNA
ctgttaaccatgacacatttcttattccgcaaccaactttcaatgccacaactcttagtgcgggatactatcctaaaata

SEQ ID NO: 18647 - DNA, 80 bp, synthetic construct
  misc_feature 1..80: note = Synthetic: >KF636752_15-cand-200-279
  source 1..80: mol_type = other DNA
ggagatacagttgttacatgggaagccattgttacaggtgactcagccgaaaatcaaaagtttaaggtggattatgataa

SEQ ID NO: 18648 - DNA, 80 bp, synthetic construct
  misc_feature 1..80: note = Synthetic: >KF636752_15-cand-280-359
  source 1..80: mol_type = other DNA
ttacataccccatgaatttggccaaggtattgtcttaaaagtctttaatagagacaaggctagtgcttcaacaccacccg

SEQ ID NO: 18649 - DNA, 80 bp, synthetic construct
  misc_feature 1..80: note = Synthetic: >KF636752_15-cand-360-439
  source 1..80: mol_type = other DNA
catttctctttggttcgacttttgacaataccacacacactatgttgatagcagtcaacacaacacaccgaacagtcgca

SEQ ID NO: 18650 - DNA, 80 bp, synthetic construct
  misc_feature 1..80: note = Synthetic: >KF636752_15-cand-440-519
  source 1..80: mol_type = other DNA
gtttgccgatttgagttctgtagtactcctgttgttgcatcaatgattaataatggtaatttccaacaatataaccactc

SEQ ID NO: 18651 - DNA, 80 bp, synthetic construct
  misc_feature 1..80: note = Synthetic: >KF636752_15-cand-520-599
  source 1..80: mol_type = other DNA
ttcactatttactagtgcagaggattgcatttatgtgaattaccagaactttacaatgaataacaccatgggtgacctgt

SEQ ID NO: 18652 - DNA, 80 bp, synthetic construct
  misc_feature 1..80: note = Synthetic: >KF636752_15-cand-600-679
  source 1..80: mol_type = other DNA
ctcgaacaggaactgtatattacagttttcaataccttaatggttatttttctatttattacgcctatagggctttgcac

SEQ ID NO: 18653 - DNA, 80 bp, synthetic construct
  misc_feature 1..80: note = Synthetic: >KF636752_15-cand-690-769
  source 1..80: mol_type = other DNA
aacctaagtttctgtcaccatttatgcatttccctctaagcattgcagttactaattttcttgttcctccagtctggaac

SEQ ID NO: 18654 - DNA, 80 bp, synthetic construct
  misc_feature 1..80: note = Synthetic: >KF636752_15-cand-780-859
  source 1..80: mol_type = other DNA
aaaatcagaatgcccaaactcaagcacgtggacaatttgtcattgagtacgctatgctccgactgcaatccatgtacttt

SEQ ID NO: 18655 - DNA, 80 bp, synthetic construct
  misc_feature 1..80: note = Synthetic: >KF636752_15-cand-860-939
  source 1..80: mol_type = other DNA
gattatcaaaatggcactctcattaattacactagttgtgacgacctttcatgcctcacacaaacaccgtgctcaacgca

SEQ ID NO: 18656 - DNA, 80 bp, synthetic construct
  misc_feature 1..80: note = Synthetic: >KF636752_15-cand-940-1019
  source 1..80: mol_type = other DNA
agcgccgtgtccaactacatcatgtccgacacaaaagtcaactactagtgttacaacaactactcctactactattagta

SEQ ID NO: 18657 - DNA, 80 bp, synthetic construct
  misc_feature 1..80: note = Synthetic: >KF636752_15-cand-1020-1099
  source 1..80: mol_type = other DNA
ctactataaagccaacaactattagtagtacaacttcaactacaactcaaacaactagcagaaccacaaccgcagaaaca

SEQ ID NO: 18658 - DNA, 80 bp, synthetic construct
  misc_feature 1..80: note = Synthetic: >KF636752_15-cand-1100-1179
  source 1..80: mol_type = other DNA
acaactacaactgttgcttctacagtttcacaaggtactacaaatgaaacttatagtaccttacctccttgtaacaacta

SEQ ID NO: 18659 - DNA, 80 bp, synthetic construct
  misc_feature 1..80: note = Synthetic: >KF636752_15-cand-1180-1259
  source 1..80: mol_type = other DNA
tacgaccataacgcaatcaccttgtaatgatgttgcgtatttttggactatggtttttacaattataatatccatttcct

SEQ ID NO: 18660 - DNA, 80 bp, synthetic construct
  misc_feature 1..80: note = Synthetic: >KF636752_15-cand-1260-1339
  source 1..80: mol_type = other DNA
tcatattgggtgtgcttctctgcagctcaattgactcatatgaagaggaagttaaacttcatcaaatctaaacgaacttt

SEQ ID NO: 18661 - DNA, 80 bp, synthetic construct
  misc_feature 1..80: note = Synthetic: >KF636752_15-cand-1340-1419
  source 1..80: mol_type = other DNA
atgaactatttcaacaaaattgtctcgcatagcagacaatttaattttcaaagaccacgcataatcgtagcccgcaaaga

SEQ ID NO: 18662 - DNA, 80 bp, synthetic construct
  misc_feature 1..80: note = Synthetic: >KF636752_15-cand-1420-1499
  source 1..80: mol_type = other DNA
agggctttacgagtgtgtgatattttatcggacttacgccgttaaaggttacggaacaacatggtcgcacgctatagact

SEQ ID NO: 18663 - DNA, 80 bp, synthetic construct
  misc_feature 1..80: note = Synthetic: >KF636752_15-cand-1500-1579
  source 1..80: mol_type = other DNA
ctgcatcttgcaacttattctatcagcatgtcacctatccataacccgggatgtacagccttacgttcatgaagccaatt

SEQ ID NO: 18664 - DNA, 80 bp, synthetic construct
  misc_feature 1..80: note = Synthetic: >KF636752_15-cand-1580-1659
  source 1..80: mol_type = other DNA
gtactaaacaggtggcaacagaaggcccttttatggccgcttacccgttaggcaaatacggttttattaacacttactat

SEQ ID NO: 18665 - DNA, 80 bp, synthetic construct
  misc_feature 1..80: note = Synthetic: >KF636752_15-cand-1660-1739
  source 1..80: mol_type = other DNA
cctgacaggatatttaggtcaaacactactgcattattcacagatttgtttccagtaataggaactactgttacaccgtg

SEQ ID NO: 18666 - DNA, 80 bp, synthetic construct
  misc_feature 1..80: note = Synthetic: >KF636752_15-cand-1740-1819
  source 1..80: mol_type = other DNA
gaaggcttttaatgctctcacaacaaatgagagaaaagacaagcgcaactttgagcgacaccctttcggagaaggcgttt

SEQ ID NO: 18667 - DNA, 80 bp, synthetic construct
  misc_feature 1..80: note = Synthetic: >KF636752_15-cand-1820-1899
  source 1..80: mol_type = other DNA
ttgtcacaataaaacacactcaagtctctgggccttctacaccccctatgtatttgtttggcacttattttaattcatct

SEQ ID NO: 18668 - DNA, 80 bp, synthetic construct
  misc_feature 1..80: note = Synthetic: >KF636752_15-cand-1900-1979
  source 1..80: mol_type = other DNA
tcttacaccttagccattagcttagatggtctttataggcgtatagaagtgtgtaattttcaggtgtgtcaaaaccctgt

SEQ ID NO: 18669 - DNA, 80 bp, synthetic construct
  misc_feature 1..80: note = Synthetic: >KF636752_15-cand-1980-2059
  source 1..80: mol_type = other DNA
tatgtattatgcaaaggtttctaacccagcacagggcaaccctttgatttattcgcaacgtgcgtatactgattacaact

SEQ ID NO: 18670 - DNA, 80 bp, synthetic construct
  misc_feature 1..80: note = Synthetic: >KF636752_15-cand-2060-2139
  source 1..80: mol_type = other DNA
catgtgtaagtcaaacttcacaaagttttaatatcacttcacaaggtgacaaaaatggtgccttctctaaagacactatt

SEQ ID NO: 18671 - DNA, 80 bp, synthetic construct
  misc_feature 1..80: note = Synthetic: >KF636752_15-cand-2140-2219
  source 1..80: mol_type = other DNA
actacctatgtttttaaatatcaaaatggcatattttctgttttccatggtttccacaatggaacagaccatgtgcctta

SEQ ID NO: 18672 - DNA, 80 bp, synthetic construct
  misc_feature 1..80: note = Synthetic: >KF636752_15-cand-2220-2299
  source 1..80: mol_type = other DNA
tccaaaaccagcttttgagtttcctctagatattcccataacacactttatcattccacccacagtggaagaacctgcgc

SEQ ID NO: 18673 - DNA, 80 bp, synthetic construct
  misc_feature 1..80: note = Synthetic: >KF636752_15-cand-2300-2379
  source 1..80: mol_type = other DNA
aaggtcagggttacactaggggaaactatgttgtttattatgcccaacttaagaaaagcacattcatgttcggttttgac

SEQ ID NO: 18674 - DNA, 80 bp, synthetic construct
  misc_feature 1..80: note = Synthetic: >KF636752_15-cand-2380-2459
  source 1..80: mol_type = other DNA
tccaatggactcataactagatacattgactgtgctgctggacctaaagatgaactaatgtgttcacaaggtagttttaa

SEQ ID NO: 18675 - DNA, 80 bp, synthetic construct
  misc_feature 1..80: note = Synthetic: >KF636752_15-cand-2460-2539
  source 1..80: mol_type = other DNA
catcacacctggtgtttacactactacaaattacagagccacacctaaacagcatgttgtaataacatctgctgatgtga

SEQ ID NO: 18676 - DNA, 80 bp, synthetic construct
  misc_feature 1..80: note = Synthetic: >KF636752_15-cand-2540-2619
  source 1..80: mol_type = other DNA
gcgctgaatgtccttttcaatcacttattaatgtgactgaagcaaccattccctcacctgctttctggagaaggcattat

SEQ ID NO: 18677 - DNA, 80 bp, synthetic construct
  misc_feature 1..80: note = Synthetic: >KF636752_15-cand-2620-2699
  source 1..80: mol_type = other DNA
gtgagaaattgtaactatgacatctctgttttcactgacaatgctgacgtctatagtttacaatgctatggtgtagcgcc

SEQ ID NO: 18678 - DNA, 80 bp, synthetic construct
  misc_feature 1..80: note = Synthetic: >KF636752_15-cand-2700-2779
  source 1..80: mol_type = other DNA
ctcaagtcttgcagatatgtgttgggaagaagctcacatagattacatgaaaatatctgagaaggacatcttctcgttta

SEQ ID NO: 18679 - DNA, 80 bp, synthetic construct
  misc_feature 1..80: note = Synthetic: >KF636752_15-cand-2780-2859
  source 1..80: mol_type = other DNA
aaccaagtggagctggtgattttgctaagtataactataaattaccctctgattttatgggttgcactgttgttttcaca

SEQ ID NO: 18680 - DNA, 80 bp, synthetic construct
  misc_feature 1..80: note = Synthetic: >KF636752_15-cand-2860-2939
  source 1..80: mol_type = other DNA
aatcaagaattaacgtgcaacgcaactagtgggcaactctgtcatgtctacactaacaatttgacaaattatcccgcaga

SEQ ID NO: 18681 - DNA, 80 bp, synthetic construct
  misc_feature 1..80: note = Synthetic: >KF636752_15-cand-2940-3019
  source 1..80: mol_type = other DNA
ggctactgcatgggataagagtcattatgaatctatcgaacgctaccaaatgtggagttcagaaaacgtctacaactgtg

SEQ ID NO: 18682 - DNA, 80 bp, synthetic construct
  misc_feature 1..80: note = Synthetic: >KF636752_15-cand-3020-3099
  source 1..80: mol_type = other DNA
aactccaagaagttggaccacagcaattcaaccgtatgcctaggaattgttatgttcgtagtaacaactccaatgactat

SEQ ID NO: 18683 - DNA, 80 bp, synthetic construct
  misc_feature 1..80: note = Synthetic: >KF636752_15-cand-3090-3169
  source 1..80: mol_type = other DNA
caatgactattggcaacctatgagttttagaggcgtgaatagtttaatggttgcaatggccataactctcaaacccacta

SEQ ID NO: 18684 - DNA, 80 bp, synthetic construct
  misc_feature 1..80: note = Synthetic: >KF636752_15-cand-3170-3249
  source 1..80: mol_type = other DNA
gaacatctgctactgtgtgtggttataaacaaaagaccacaccgctagttttaaatgaatgtattacttatcacatttat

SEQ ID NO: 18685 - DNA, 80 bp, synthetic construct
  misc_feature 1..80: note = Synthetic: >KF636752_15-cand-3250-3329
  source 1..80: mol_type = other DNA
ggttataagggaactggtgtaattgtcagtgctaattacaccttccaaagttttcaaactgtgcaattaacctcaaccgg

SEQ ID NO: 18686 - DNA, 80 bp, synthetic construct
  misc_feature 1..80: note = Synthetic: >KF636752_15-cand-3330-3409
  source 1..80: mol_type = other DNA
ctctctgcactcttttaaatataacaatactatttatggtattttgccatgtgcgcaggcacaagttagtattgtaacag

SEQ ID NO: 18687 - DNA, 80 bp, synthetic construct
  misc_feature 1..80: note = Synthetic: >KF636752_15-cand-3410-3489
  source 1..80: mol_type = other DNA
cgggctcaaaccatgacaatgttgctgtcgtttacaatggtctaggctgtaatgcatttcaaagtaaaatgcaaggtgtg

SEQ ID NO: 18688 - DNA, 80 bp, synthetic construct
  misc_feature 1..80: note = Synthetic: >KF636752_15-cand-3490-3569
  source 1..80: mol_type = other DNA
gataatactgaatggtctgtctacactaatttctcatcaccaattgacacacctgtaggttgtctaactggtgctattca

SEQ ID NO: 18689 - DNA, 80 bp, synthetic construct
  misc_feature 1..80: note = Synthetic: >KF636752_15-cand-3570-3649
  source 1..80: mol_type = other DNA
agctcaggaaaattctactgagtgtcaatttgctctcggccttgattcttgtgtcaactatacagctgacacaagattga

SEQ ID NO: 18690 - DNA, 80 bp, synthetic construct
  misc_feature 1..80: note = Synthetic: >KF636752_15-cand-3650-3729
  source 1..80: mol_type = other DNA
gaacagctcgtgctgccgatagagccctaacatttaattacatgtattttgcacaagaactcccgtctcagtctgaacag

SEQ ID NO: 18691 - DNA, 80 bp, synthetic construct
  misc_feature 1..80: note = Synthetic: >KF636752_15-cand-3730-3809
  source 1..80: mol_type = other DNA
tctgtggcatttgataactcaacactacagatacctattaactttactattggcattgagtatgaaaccatacccgtgac

SEQ ID NO: 18692 - DNA, 80 bp, synthetic construct
  misc_feature 1..80: note = Synthetic: >KF636752_15-cand-3810-3889
  source 1..80: mol_type = other DNA
catgcctaaagttactgttgactgtgcacaatatgtttgtggagacaattcagaatgcagaaccttactagtacagtatg

SEQ ID NO: 18693 - DNA, 80 bp, synthetic construct
  misc_feature 1..80: note = Synthetic: >KF636752_15-cand-3890-3969
  source 1..80: mol_type = other DNA
gcacattttgtgaaactattaatgatgctttgcgcggtgttgcactgcagcaagacgtgaaccaaaaagatgtcttttcg

SEQ ID NO: 18694 - DNA, 80 bp, synthetic construct
  misc_feature 1..80: note = Synthetic: >KF636752_15-cand-3970-4049
  source 1..80: mol_type = other DNA
tcggttcgtaggcttgctaaagtatcaagtccaatgaatttgggcaaccttaatggtttcaacttttctagcatcctaaa

SEQ ID NO: 18695 - DNA, 80 bp, synthetic construct
  misc_feature 1..80: note = Synthetic: >KF636752_15-cand-4050-4129
  source 1..80: mol_type = other DNA
tcaggaagctattaatggcaacaactttcaggcacgttctgctatcgaagacttgttctttgataaaattgagactgccg

SEQ ID NO: 18696 - DNA, 80 bp, synthetic construct
  misc_feature 1..80: note = Synthetic: >KF636752_15-cand-4130-4209
  source 1..80: mol_type = other DNA
atgttggtttccaaaagaagtacgatgagtgcactggaggttctgttgtcaaggaccttggttgtgctcaaagttttaac

SEQ ID NO: 18697 - DNA, 80 bp, synthetic construct
  misc_feature 1..80: note = Synthetic: >KF636752_15-cand-4210-4289
  source 1..80: mol_type = other DNA
ggtttaatggtgttaccaccacaaatgactgatgcacatgtagctgcttacactacatctgcagcccttgggagtttctt

SEQ ID NO: 18698 - DNA, 80 bp, synthetic construct
  misc_feature 1..80: note = Synthetic: >KF636752_15-cand-4290-4369
  source 1..80: mol_type = other DNA
ctcaattcctaatacaatgcaaatggcataccgcttcaatggtatcgcagtcacccaaaaggtgcttgtcgataaccaga

SEQ ID NO: 18699 - DNA, 80 bp, synthetic construct
  misc_feature 1..80: note = Synthetic: >KF636752_15-cand-4370-4449
  source 1..80: mol_type = other DNA
agcaaattgccaacaaatttaaccaggctatgatgtcagtacaaacaggttttaaagctaccagcagtgcccttgaaaaa

SEQ ID NO: 18700 - DNA, 80 bp, synthetic construct
  misc_feature 1..80: note = Synthetic: >KF636752_15-cand-4450-4529
  source 1..80: mol_type = other DNA
cttcaaaaggttgtcaatgacaatgcacaggcacttaacaacctcgtagcccaacttactaacaactttggagctatttc

SEQ ID NO: 18701 - DNA, 80 bp, synthetic construct
  misc_feature 1..80: note = Synthetic: >KF636752_15-cand-4530-4609
  source 1..80: mol_type = other DNA
atcagctatcaatgacattactcagcggctcgataaacttgaggctgacgcccaaatcgaccgacttatcaatggcagac

SEQ ID NO: 18702 - DNA, 80 bp, synthetic construct
  misc_feature 1..80: note = Synthetic: >KF636752_15-cand-4610-4689
  source 1..80: mol_type = other DNA
tgcaagtgcttcaaacatttgtaactcagcaactcattcgtgcttctgaaatacgtgcatcagctaaattagcagcacag

SEQ ID NO: 18703 - DNA, 80 bp, synthetic construct
  misc_feature 1..80: note = Synthetic: >KF636752_15-cand-4690-4769
  source 1..80: mol_type = other DNA
aagatgtcagagtgtgtgcaaggacagtcgcagagacttgatttctgtggcagaggtatgcacctcatgtcctttccaca

SEQ ID NO: 18704 - DNA, 80 bp, synthetic construct
  misc_feature 1..80: note = Synthetic: >KF636752_15-cand-4770-4849
  source 1..80: mol_type = other DNA
agcagctccatatggcatggtgtttttacacgtgctatataagcccacagattacatcaatgtcactacagtgccggcaa

SEQ ID NO: 18705 - DNA, 80 bp, synthetic construct
  misc_feature 1..80: note = Synthetic: >KF636752_15-cand-4850-4929
  source 1..80: mol_type = other DNA
tttgcagtaatgatgtggcatacttccctgtagatggtgtctttgtgtattataacaactcactaatgtttaccaagcgt

SEQ ID NO: 18706 - DNA, 80 bp, synthetic construct
  misc_feature 1..80: note = Synthetic: >KF636752_15-cand-4930-5009
  source 1..80: mol_type = other DNA
aactactttgagccagaaataatcaccattgacaacatacggtctgcaggatcttgtaatgttgacgtcacttacgtcaa

SEQ ID NO: 18707 - DNA, 80 bp, synthetic construct
  misc_feature 1..80: note = Synthetic: >KF636752_15-cand-5010-5089
  source 1..80: mol_type = other DNA
tcacactatttacaatccagaaatgcctgagcttgaagatttcaaacaggagctggaagaaattcgtaaaaacttttcca

SEQ ID NO: 18708 - DNA, 80 bp, synthetic construct
  misc_feature 1..80: note = Synthetic: >KF636752_2-cand-30-109
  source 1..80: mol_type = other DNA
cgcaagtagtaaggcgtagtataccctaccagtaggactgggttgctattcctacacttgtgctgaatggattctatgta

SEQ ID NO: 18709 - DNA, 80 bp, synthetic construct
  misc_feature 1..80: note = Synthetic: >KF636752_3-cand-40-119
  source 1..80: mol_type = other DNA
ggtgacaaatttggtaccatacatgatatcggcaatccaaaagcactcaagtgtgtccttgatgcagaggtgaattggaa

SEQ ID NO: 18710 - DNA, 80 bp, synthetic construct
  misc_feature 1..80: note = Synthetic: >KF636752_4-cand-0-79
  source 1..80: mol_type = other DNA
gattgaagccaattcaagaatctggtcactgtgtgtcacacttcacaatgacattttgctggctaaagatgctacagagg

SEQ ID NO: 18711 - DNA, 80 bp, synthetic construct
  misc_feature 1..80: note = Synthetic: >KF636752_4-cand-90-169
  source 1..80: mol_type = other DNA
gcttacaacgttgttgtctgtattgctatctatgccaggtgctgttgaccttactaagttgtgtgatgatgtctttgaga

SEQ ID NO: 18712 - DNA, 80 bp, synthetic construct
  misc_feature 1..80: note = Synthetic: >KF636752_5-cand-0-79
  source 1..80: mol_type = other DNA
cggaggccaaccgcttaataattgtgtgcgtgttttatgcactcacactggtacaggtcgtgctataactgcagatccag

SEQ ID NO: 18713 - DNA, 80 bp, synthetic construct
  misc_feature 1..80: note = Synthetic: >KF636752_5-cand-100-179
  source 1..80: mol_type = other DNA
tcatatggtggttcttcttgttgcctctactgtagatgtcacatttcccacccaagtcataacgggttgtgtaagtataa

SEQ ID NO: 18714 - DNA, 80 bp, synthetic construct
  misc_feature 1..80: note = Synthetic: >KF636752_6-cand-0-79
  source 1..80: mol_type = other DNA
gcaaactgcttattgtcgtacctgacattagtgtttataacaacacagtggaaggaacactcttaacttatgctggcgcc

SEQ ID NO: 18715 - DNA, 80 bp, synthetic construct
  misc_feature 1..80: note = Synthetic: >KF636752_6-cand-150-229
  source 1..80: mol_type = other DNA
cagcacctacattggcttggcctttagtactttcagctgtaagacgtgtttcagcaacaaagttacaaaataatgagttg

SEQ ID NO: 18716 - DNA, 80 bp, synthetic construct
  misc_feature 1..80: note = Synthetic: >KF636752_6-cand-210-289
  source 1..80: mol_type = other DNA
agttacaaaataatgagttggcacctcagcttttgaatcaaaaagctgttactggaggttctgaacaaaacatatgcgac

SEQ ID NO: 18717 - DNA, 80 bp, synthetic construct
  misc_feature 1..80: note = Synthetic: >KF636752_7-cand-150-229
  source 1..80: mol_type = other DNA
aaccacttacaatactattcgatgcgaggcttagtggtcatattgatcaattctgcaatgcagataatgctgtcttgtac

SEQ ID NO: 18718 - DNA, 80 bp, synthetic construct
  misc_feature 1..80: note = Synthetic: >KF636752_7-cand-270-349
  source 1..80: mol_type = other DNA
ctgagcactgttctattaatggtgtcattgtaaactctacaccagatggcggggaaaaacctgccataaattgtacattc

SEQ ID NO: 18719 - DNA, 80 bp, synthetic construct
  misc_feature 1..80: note = Synthetic: >KF636752_8-cand-0-79
  source 1..80: mol_type = other DNA
tctgtaattgacttgctccttgacgatttcgttgaaataatcaagagccaagacttaactgtagtctctaaagtagtcaa

SEQ ID NO: 18720 - DNA, 80 bp, synthetic construct
  misc_feature 1..80: note = Synthetic: >KF636752_8-cand-120-199
  source 1..80: mol_type = other DNA
tgcaaagatggagttgtgcaaacattctatcctagattgcagtcttcatcagaatggcagcctggccaatctatgcctag

SEQ ID NO: 18721 - DNA, 80 bp, synthetic construct
  misc_feature 1..80: note = Synthetic: >KF636752_8-cand-240-319
  source 1..80: mol_type = other DNA
cttcttaactatggtcaacctcctaaattgcctaatggcatacttatgaatgttgccaagtacactcaattgtgccagta

SEQ ID NO: 18722 - DNA, 80 bp, synthetic construct
  misc_feature 1..80: note = Synthetic: >KF636752_8-cand-290-369
  source 1..80: mol_type = other DNA
tgttgccaagtacactcaattgtgccagtacttgaacaaaaccaccatagcagttccagctaaaatgcgtgtcatccatt

SEQ ID NO: 18723 - DNA, 80 bp, synthetic construct
  misc_feature 1..80: note = Synthetic: >KF636752_9-cand-0-79
  source 1..80: mol_type = other DNA
agcatgatgtgctttaccagctggtggataattctttcatcaagttccctaaagttctcgttgaaggtgcgtttcgtatt

SEQ ID NO: 18724 - DNA, 80 bp, synthetic construct
  misc_feature 1..80: note = Synthetic: >KF636752_9-cand-90-169
  source 1..80: mol_type = other DNA
tgacaacacaatattgtagacatggagtttgcgaagactctatggctggactatgcctgtctcttcgtggctcatgggtt

SEQ ID NO: 18725 - DNA, 80 bp, synthetic construct
  misc_feature 1..80: note = Synthetic: >KF636752_9-cand-180-259
  source 1..80: mol_type = other DNA
catattacacatcgcaaagcggagtctattgcggtaatgatgttgtggatcttctgatgaacatcctagcgcctatgttt

SEQ ID NO: 18726 - DNA, 80 bp, synthetic construct
  misc_feature 1..80: note = Synthetic: >KF636752_9-cand-400-479
  source 1..80: mol_type = other DNA
actagcttttctgtgttccttcctcgtgctctgcgtatccacacagtatcctgtattgccaactgtttattctatcttgt

SEQ ID NO: 18727 - DNA, 80 bp, synthetic construct
  misc_feature 1..80: note = Synthetic: >KF636752_9-cand-500-579
  source 1..80: mol_type = other DNA
atggctaatgaagtttctttcattatgcactgctcgtggtgtgtgatgtttgtaccaatagtacccttttggtgtacagc

SEQ ID NO: 18728 - DNA, 80 bp, synthetic construct
  misc_feature 1..80: note = Synthetic: >KF636752_9-cand-600-679
  source 1..80: mol_type = other DNA
gctctaagcatgtgtactggtttttccagacattttgcaagaaaaatgttgttgtacatgatgctacatttagcagtttt

SEQ ID NO: 18729 - DNA, 80 bp, synthetic construct
  misc_feature 1..80: note = Synthetic: >KJ473795_1-cand-40-119
  source 1..80: mol_type = other DNA
agtgctggatgtaaccacagctgtaaccaagccttggtttgtgctgaagtgtggttcacttcttgaatctgcttgggatg

SEQ ID NO: 18730 - DNA, 80 bp, synthetic construct
  misc_feature 1..80: note = Synthetic: >KJ473796_1-cand-40-119
  source 1..80: mol_type = other DNA
ttgttgatgctatgaggttttcccttaatttcactgacagccaaattatacgcactggtgttatttctgttattactagc

SEQ ID NO: 18731 - DNA, 80 bp, synthetic construct
  misc_feature 1..80: note = Synthetic: >KJ473797_1-cand-30-109
  source 1..80: mol_type = other DNA
gttcagatttctggttgtaatgttagctatgtcaatgttagttctgagcaactgcctgacatagtgcctgactttatgga

SEQ ID NO: 18732 - DNA, 80 bp, synthetic construct
  misc_feature 1..80: note = Synthetic: >KJ473797_2-cand-0-79
  source 1..80: mol_type = other DNA
tcttggggcatgtactttttccagaaaaactctgagggtcgtgccattgtaagaatttgtaagtggacttcatttaatac

SEQ ID NO: 18733 - DNA, 80 bp, synthetic construct
  misc_feature 1..80: note = Synthetic: >KJ473798_1-cand-0-79
  source 1..80: mol_type = other DNA
ggctgtccttgttgtgcgtaatcgttgtttagacttttacgttgaggacgttgcacctaagtttagacaggctctagagt

SEQ ID NO: 18734 - DNA, 80 bp, synthetic construct
  misc_feature 1..80: note = Synthetic: >KJ473798_1-cand-100-179
  source 1..80: mol_type = other DNA
ggtctttttgaccttgcagttgagacctttaaagttgctggtgagacatttagccgtgttggcgactgcgtcctccttga

SEQ ID NO: 18735 - DNA, 80 bp, synthetic construct
  misc_feature 1..80: note = Synthetic: >KJ473798_2-cand-0-79
  source 1..80: mol_type = other DNA
tgtaatgttgtttatgtcaacattactgatgaccagttgccacaagttcagcccgactacattgatgtcaacaagactct

SEQ ID NO: 18736 - DNA, 80 bp, synthetic construct
  misc_feature 1..80: note = Synthetic: >KJ473798_2-cand-110-189
  source 1..80: mol_type = other DNA
tacaggtccgaacttgcctcttgacatctttaaccagacatatcttaatatcagtgctgagattgatgctcttgagaata

SEQ ID NO: 18737 - DNA, 80 bp, synthetic construct
  misc_feature 1..80: note = Synthetic: >KJ473798_3-cand-0-79
  source 1..80: mol_type = other DNA
ctggacttatttccactaatagctttgtttattttaatggcacagcagctaataagcgttgtaatggctatgccactgat

SEQ ID NO: 18738 - DNA, 80 bp, synthetic construct
  misc_feature 1..80: note = Synthetic: >KJ473798_3-cand-150-229
  source 1..80: mol_type = other DNA
ttgtgcttcttgtttctgatctgctttacaagttcagttgcactaatgacactactgctgtgctggatgctggaatacct

SEQ ID NO: 18739 - DNA, 80 bp, synthetic construct
  misc_feature 1..80: note = Synthetic: >KJ473798_4-cand-240-319
  source 1..80: mol_type = other DNA
ctactttgcagtccacttctgggaaggattgtattgtcaatgttaaagttgacaatcatatgttttatcatgcagctcat

SEQ ID NO: 18740 - DNA, 80 bp, synthetic construct
  misc_feature 1..80: note = Synthetic: >KJ473798_5-cand-0-79
  source 1..80: mol_type = other DNA
gccacgaacttttgtcactttgccacgccactttacgcattcttggattaatttgcgtataaagtggaagaatggttttt

SEQ ID NO: 18741 - DNA, 80 bp, synthetic construct
  misc_feature 1..80: note = Synthetic: >KJ473798_5-cand-90-169
  source 1..80: mol_type = other DNA
ccctccagaattttcatggattgattttgttacatttgttaatgggacggagaaagttctttcagaacgttctatctgtg

SEQ ID NO: 18742 - DNA, 80 bp, synthetic construct
  misc_feature 1..80: note = Synthetic: >KJ473798_5-cand-180-259
  source 1..80: mol_type = other DNA
acagttcactactaatctgactttgattgaggaggcatcaagttattccactcctgttgttgtgcgtgctgatgattgtc

SEQ ID NO: 18743 - DNA, 80 bp, synthetic construct
  misc_feature 1..80: note = Synthetic: >KJ473798_5-cand-270-349
  source 1..80: mol_type = other DNA
tcagtcgttgaacaattacctaacctttggttccatttgtctttctttaaatggtaccattggtaaaggctgtacgcttg

SEQ ID NO: 18744 - DNA, 80 bp, synthetic construct
  misc_feature 1..80: note = Synthetic: >KJ473798_5-cand-370-449
  source 1..80: mol_type = other DNA
tcacagtacattcctatttggaatgtttgggtcgcttacaccaatggtgataatatccttggtgttagggagcccaacac

SEQ ID NO: 18745 - DNA, 80 bp, synthetic construct
  misc_feature 1..80: note = Synthetic: >KJ473798_5-cand-470-549
  source 1..80: mol_type = other DNA
tcgtctatcagaatgtctgcacatcctatacaatttttggccattcagggcgtggcattatcagacctgccaatacatct

SEQ ID NO: 18746 - DNA, 80 bp, synthetic construct
  misc_feature 1..80: note = Synthetic: >KJ473798_5-cand-560-639
  source 1..80: mol_type = other DNA
gtgtgtattatactgctgcctctggccaattgttgggttttaagaataccactacaggcgaagtgttttctgtaacacca

SEQ ID NO: 18747 - DNA, 80 bp, synthetic construct
  misc_feature 1..80: note = Synthetic: >KJ473799_1-cand-0-79
  source 1..80: mol_type = other DNA
ttctgcatcaaggtaatgaaattgtgggtgctacgtggtctggtgataaagttgttctttacactagaacaggtttaagc

SEQ ID NO: 18748 - DNA, 80 bp, synthetic construct
  misc_feature 1..80: note = Synthetic: >KJ473799_1-cand-180-259
  source 1..80: mol_type = other DNA
ttgttgtgtccacgggtgctaatggtttaattaccaattattcaatttgtaagaattgtagtggttttcctgaccatgtc

SEQ ID NO: 18749 - DNA, 80 bp, synthetic construct
  misc_feature 1..80: note = Synthetic: >KJ473799_2-cand-150-229
  source 1..80: mol_type = other DNA
tttgtttttcactggtacctaatggaggctgtgctatgagcattgttacgcgtggttcctatggtgaaccacagaaattt

SEQ ID NO: 18750 - DNA, 80 bp, synthetic construct
  misc_feature 1..80: note = Synthetic: >KJ473799_2-cand-270-349
  source 1..80: mol_type = other DNA
ttggagtacctaaagctccattgccaggtgtcctcgatatgagtgaagtgcattataatgtttgcacctcttatactatc

SEQ ID NO: 18751 - DNA, 80 bp, synthetic construct
  misc_feature 1..80: note = Synthetic: >KJ473800_1-cand-40-119
  source 1..80: mol_type = other DNA
attaaagttgattgctcaacgcgctgagagttctgctgttgagcaaacaactgctgagcccccctcgacaaatgatgtga

SEQ ID NO: 18752 - DNA, 80 bp, synthetic construct
  misc_feature 1..80: note = Synthetic: >KJ473800_2-cand-40-119
  source 1..80: mol_type = other DNA
agatttctggttgcaatgttagctatgtcaatgttagttctgaaaacttgcctgacatagtgcctgattttatggatgtt

SEQ ID NO: 18753 - DNA, 80 bp, synthetic construct; identical to SEQ ID NO: 18747
  misc_feature 1..80: note = Synthetic: >KJ473800_3-cand-0-79
  source 1..80: mol_type = other DNA

SEQ ID NO: 18754 - DNA, 80 bp, synthetic construct; identical to SEQ ID NO: 18748
  misc_feature 1..80: note = Synthetic: >KJ473800_3-cand-180-259
  source 1..80: mol_type = other DNA

SEQ ID NO: 18755 - DNA, 80 bp, synthetic construct
  misc_feature 1..80: note = Synthetic: >KJ473800_4-cand-0-79
  source 1..80: mol_type = other DNA
ataggactgctgtctgtgctgattcagccagttttactatgcggcttattaagggttctttctcttatggcgatgtttat

SEQ ID NO: 18756 - DNA, 80 bp, synthetic construct
  misc_feature 1..80: note = Synthetic: >KJ473800_4-cand-70-149
  source 1..80: mol_type = other DNA
cgatgtttatgttgacatctggtctggagaatgcccttttagttttgctgcgttgaataattatttgagctttggctcta

SEQ ID NO: 18757 - DNA, 80 bp, synthetic construct
  misc_feature 1..80: note = Synthetic: >KJ473800_4-cand-230-309
  source 1..80: mol_type = other DNA
gccgcactgtatgtgtctttttctgagggtgacaatgttatcggtgtacctaaagctccattgccaggcgtcctcgatat

SEQ ID NO: 18758 - DNA, 80 bp, synthetic construct
  misc_feature 1..80: note = Synthetic: >KJ473806_1-cand-0-79
  source 1..80: mol_type = other DNA
attactttgacggcatgaaggtggagataatgaacaaaaccatttcagatgatagtacggcttaaacttgacgaaatctt

SEQ ID NO: 18759 - DNA, 80 bp, synthetic construct
  misc_feature 1..80: note = Synthetic: >KJ473806_1-cand-80-159
  source 1..80: mol_type = other DNA
ttgatttcgagctatttcagctgaagtttgtagtaattgctaattgctatcactaaaatgtttccagaaatcaattttga

SEQ ID NO: 18760 - DNA, 80 bp, synthetic construct
  misc_feature 1..80: note = Synthetic: >KJ473806_2-cand-0-79
  source 1..80: mol_type = other DNA
tatgttacaggtgattgtggtgagtttgttcactttctttaccatattacgcgttcgcgtaagggtgatttaggtgatac

SEQ ID NO: 18761 - DNA, 80 bp, synthetic construct
  misc_feature 1..80: note = Synthetic: >KJ473806_2-cand-150-229
  source 1..80: mol_type = other DNA
gactgtcccacatgcaatagcacggaacgcaccataaatgcgagtgtcgtttctgctagtttgagtagagacggttctga

SEQ ID NO: 18762 - DNA, 80 bp, synthetic construct
  misc_feature 1..80: note = Synthetic: >KJ473806_3-cand-0-79
  source 1..80: mol_type = other DNA
accgtcgaactggacttgcagtgacggttattggcagtacaaaaatgctcatggactgtttgtctcttatcatagtacag

SEQ ID NO: 18763 - DNA, 80 bp, synthetic construct
  misc_feature 1..80: note = Synthetic: >KJ473806_3-cand-130-209
  source 1..80: mol_type = other DNA
tggggcctttatttttggcagaaaaataatgaaggccgtgctgtatttagaatctgtaagtgggatgcaagtgcacaaac

SEQ ID NO: 18764 - DNA, 80 bp, synthetic construct
  misc_feature 1..80: note = Synthetic: >KJ473806_3-cand-180-259
  source 1..80: mol_type = other DNA
aatctgtaagtgggatgcaagtgcacaaaccaactttgctcccgatagacatacagctcgtgactgctttgttaataagc

SEQ ID NO: 18765 - DNA, 80 bp, synthetic construct
  misc_feature 1..80: note = Synthetic: >KJ473806_4-cand-0-79
  source 1..80: mol_type = other DNA
tgtcaacagctgtgtttataattttgtggatgctgtgcttgaacagaagccttggtttgttagaaaactgggaaaactct

SEQ ID NO: 18766 - DNA, 80 bp, synthetic construct
  misc_feature 1..80: note = Synthetic: >KJ473806_4-cand-60-139
  source 1..80: mol_type = other DNA
tagaaaactgggaaaactctgtgagactgcatggtctttgctgtgcgatgctcttaaggagagttctcttttgtcatcag

SEQ ID NO: 18767 - DNA, 80 bp, synthetic construct
  misc_feature 1..80: note = Synthetic: >KJ473806_4-cand-190-269
  source 1..80: mol_type = other DNA
gatggtaagcttaaacttattgcagacattccatcagtttttgagagcgtttttgacgttttcaagtctgctttggaagg

SEQ ID NO: 18768 - DNA, 80 bp, synthetic construct
  misc_feature 1..80: note = Synthetic: >KJ473807_1-cand-40-119
  source 1..80: mol_type = other DNA
gggttgcatcagctttagtccaattgcagcttttgaatgttaatgaggattatacgtacttctttaaaagtggtcgtttg

SEQ ID NO: 18769 - DNA, 80 bp, synthetic construct
  misc_feature 1..80: note = Synthetic: >KJ473807_10-cand-0-79
  source 1..80: mol_type = other DNA
aaagcctcttgtttcagaacaaattgtgcactttttgccttgcgcgtttgcactttgctgttgtacacaccaattttggt

SEQ ID NO: 18770 - DNA, 80 bp, synthetic construct
  misc_feature 1..80: note = Synthetic: >KJ473807_10-cand-100-179
  source 1..80: mol_type = other DNA
acgcagttgttgtagcttgttctctaactatacgttttgcttatctgggctattacagttacaagtacaaaagcttttct

SEQ ID NO: 18771 - DNA, 80 bp, synthetic construct
  misc_feature 1..80: note = Synthetic: >KJ473807_10-cand-200-279
  source 1..80: mol_type = other DNA
taaagtggcttttgtgaatgggaaattttggtattatgatgagtcaccttatgttgtgctttgtggtggtgatcaccatg

SEQ ID NO: 18772 - DNA, 80 bp, synthetic construct
  misc_feature 1..80: note = Synthetic: >KJ473807_11-cand-0-79
  source 1..80: mol_type = other DNA
acagagatcgcagtcagagtggaaatcgttctcaaaatgaccaaaaacagggcaatcaaaatcaaaaatcgcggagcaat

SEQ ID NO: 18773 - DNA, 80 bp, synthetic construct
  misc_feature 1..80: note = Synthetic: >KJ473807_11-cand-190-269
  source 1..80: mol_type = other DNA
aggtaagaacagtggtactaacactcctaaagaacaacgttctaaatcacccgccagatctccaacagttcaaaagaaac

SEQ ID NO: 18774 - DNA, 80 bp, synthetic construct
  misc_feature 1..80: note = Synthetic: >KJ473807_11-cand-280-359
  source 1..80: mol_type = other DNA
accgccttggaaacgtgtgcctaatagcacagaagacgtgaccaagtgttttggtgtaagagacactcacagaaactttg

SEQ ID NO: 18775 - DNA, 80 bp, synthetic construct
  misc_feature 1..80: note = Synthetic: >KJ473807_11-cand-460-539
  source 1..80: mol_type = other DNA
tgttactacagaagttggctcggatgtggaaattacctacatctataagatgaaggttccaaaaacagataagaatttgc

SEQ ID NO: 18776 - DNA, 80 bp, synthetic construct
  misc_feature 1..80: note = Synthetic: >KJ473807_11-cand-550-629
  source 1..80: mol_type = other DNA
taagcaggtaagtgcttattctcaaccatcccaagctgcagaagtaccatctcagttgaatcctactgctgttgctttcc

SEQ ID NO: 18777 - DNA, 80 bp, synthetic construct
  misc_feature 1..80: note = Synthetic: >KJ473807_11-cand-640-719
  source 1..80: mol_type = other DNA
agaggatgaacaggtcgagattatcgatcaggtttatggctcatttgatgcttaagtttgcaaatcctcaactaaacatg

SEQ ID NO: 18778 - DNA, 80 bp, synthetic construct
  misc_feature 1..80: note = Synthetic: >KJ473807_11-cand-730-809
  source 1..80: mol_type = other DNA
atatgtctgtcttgctttttatagtactatgttactttgaagtggtgttgtttgctttgcaagctgtgtttctaggtgta

SEQ ID NO: 18779 - DNA, 80 bp, synthetic construct
  misc_feature 1..80: note = Synthetic: >KJ473807_12-cand-170-249
  source 1..80: mol_type = other DNA
tttgtggctagtctgaaaaatcttgtgtttacaagtactcagttggtcgaacttacgaaagcactctcaaaagccgtgtt

SEQ ID NO: 18780 - DNA, 80 bp, synthetic construct
  misc_feature 1..80: note = Synthetic: >KJ473807_12-cand-350-429
  source 1..80: mol_type = other DNA
tttacagtaaacagtgtaaaaattgcaggccgtagctttaaaagtgttggttcttacgttctgtttgataatgctataat

SEQ ID NO: 18781 - DNA, 80 bp, synthetic construct
  misc_feature 1..80: note = Synthetic: >KJ473807_12-cand-440-519
  source 1..80: mol_type = other DNA
gcagttaaggtcaaaggccttcatcaagcaggaatcaaacagactgaatacgctacgtctataattggcaaaactactaa

SEQ ID NO: 18782 - DNA, 80 bp, synthetic construct
  misc_feature 1..80: note = Synthetic: >KJ473807_12-cand-530-609
  source 1..80: mol_type = other DNA
aaaagaacagaaagtgcagatgttaaccttgtgttagtcaatgacaaacaaccactattgaaggacggtgtcactaagat

SEQ ID NO: 18783 - DNA, 80 bp, synthetic construct
  misc_feature 1..80: note = Synthetic: >KJ473807_12-cand-620-699
  source 1..80: mol_type = other DNA
aagtcgttcttttatagcggaggtgtctacagacttatgagtgataacaattttgtacttgatgaacctgtgtttcaaga

SEQ ID NO: 18784 - DNA, 80 bp, synthetic construct
  misc_feature 1..80: note = Synthetic: >KJ473807_12-cand-1070-1149
  source 1..80: mol_type = other DNA
atagatggtggtaacatttggaataagtttattaaaactgtcacagatgctgttgaatttgtaaaatcaattaaagtttc

SEQ ID NO: 18785 - DNA, 80 bp, synthetic construct
  misc_feature 1..80: note = Synthetic: >KJ473807_12-cand-1160-1239
  source 1..80: mol_type = other DNA
aatggtgttgttgttaaagccacaaaacgtttcaagagattcgcagctactctagttaatctttacagagagtttgttgc

SEQ ID NO: 18786 - DNA, 80 bp, synthetic construct
  misc_feature 1..80: note = Synthetic: >KJ473807_12-cand-1250-1329
  source 1..80: mol_type = other DNA
aagactatcaaaattggaagccaggcttttacatattatgcatttgaagtaccaaaagttttactttctggtgctttgca

SEQ ID NO: 18787 - DNA, 80 bp, synthetic construct
  misc_feature 1..80: note = Synthetic: >KJ473807_12-cand-1330-1409
  source 1..80: mol_type = other DNA
tagtgtgagaacagtcaaagctaaagagcttaacttgtctgtacaagacgttgttgttgagttcaatgtttttgatggtg

SEQ ID NO: 18788 - DNA, 80 bp, synthetic construct
  misc_feature 1..80: note = Synthetic: >KJ473807_3-cand-0-79
  source 1..80: mol_type = other DNA
atgcgctatataagcgcaatgatagttatttcataactagtcgtgatatgtatgaacctagagttccacaagaatctgac

SEQ ID NO: 18789 - DNA, 80 bp, synthetic construct
  misc_feature 1..80: note = Synthetic: >KJ473807_3-cand-100-179
  source 1..80: mol_type = other DNA
cagtgtagtttacctcaatataactcacacacagattggtgacattataccagagtatatagatgttaataaaactcttg

SEQ ID NO: 18790 - DNA, 80 bp, synthetic construct
  misc_feature 1..80: note = Synthetic: >KJ473807_4-cand-0-79
  source 1..80: mol_type = other DNA
ttgattatcatgtctcacttttgagcttggatattcaaggtgttatcaatgtttcagcttgtgtctttgtcactctgttg

SEQ ID NO: 18791 - DNA, 80 bp, synthetic construct
  misc_feature 1..80: note = Synthetic: >KJ473807_4-cand-100-179
  source 1..80: mol_type = other DNA
gagtagtgtaaattactcttctgtcattacctattgctgttcattgttgtttgtggcctacgggttttatatgggatcag

SEQ ID NO: 18792 - DNA, 80 bp, synthetic construct
  misc_feature 1..80: note = Synthetic: >KJ473807_5-cand-0-79
  source 1..80: mol_type = other DNA
agatgaaaatgcttatgcagatgtgctgcgtttctcactaaacttcactaatagccaagtttttaatggtatccatagtg

SEQ ID NO: 18793 - DNA, 80 bp, synthetic construct
  misc_feature 1..80: note = Synthetic: >KJ473807_5-cand-110-189
  source 1..80: mol_type = other DNA
agtttagttgttctaatacgagcacatatgcagaatcagatgaggttttgccttttggacctttaagcagcgtttattac

SEQ ID NO: 18794 - DNA, 80 bp, synthetic construct
  misc_feature 1..80: note = Synthetic: >KJ473807_7-cand-130-209
  source 1..80: mol_type = other DNA
gctttaatcacaggtgattcttacacattgtattctggtgatgtcaaagatggacattacacagtgtttagtgtgaaagg

SEQ ID NO: 18795 - DNA, 80 bp, synthetic construct
  misc_feature 1..80: note = Synthetic: >KJ473807_8-cand-160-239
  source 1..80: mol_type = other DNA
tcaacaactagacacttctaatactattagtgctttaatgcaaaatggtgattgtcctttcaactttgacagtttgaaca

SEQ ID NO: 18796 - DNA, 80 bp, synthetic construct
  misc_feature 1..80: note = Synthetic: >KJ473807_8-cand-280-359
  source 1..80: mol_type = other DNA
agttggttctagttgtacaatttctataatgaaaaactggatgggttttaaagcaccctggaagagtgtttatgtcacat

SEQ ID NO: 18797 - DNA, 80 bp, synthetic construct
  misc_feature 1..80: note = Synthetic: >KJ473807_9-cand-0-79
  source 1..80: mol_type = other DNA
tttgcctgaaccagttagtagtaataattggatatgtcctgttaaacctttaaatcaatacggtgttgatcactttagta

SEQ ID NO: 18798 - DNA, 80 bp, synthetic construct
  misc_feature 1..80: note = Synthetic: >KJ473807_9-cand-110-189
  source 1..80: mol_type = other DNA
ctggtaatgaaggtgtggaacttggtatttcagcttctgattatgaacaaaatccaaatcagtgggctttgtatatgtac

SEQ ID NO: 18799 - DNA, 80 bp, synthetic construct
  misc_feature 1..80: note = Synthetic: >KJ473807_9-cand-350-429
  source 1..80: mol_type = other DNA
atgaagttataggtgttacatggtctggtaactatgttaccttctatggcatttataagtcttttcgcatttacttacct

SEQ ID NO: 18800 - DNA, 80 bp, synthetic construct
  misc_feature 1..80: note = Synthetic: >KJ473808_1-cand-150-229
  source 1..80: mol_type = other DNA
ctactaacttgacatgggaactttgggtccatcgtgcttggggtgctaataagccagttaccattaggttatgcaagtgg

SEQ ID NO: 18801 - DNA, 80 bp, synthetic construct
  misc_feature 1..80: note = Synthetic: >KJ473808_1-cand-260-339
  source 1..80: mol_type = other DNA
catcaacaagatgctggccctactaatgctattgagtgtttagttaatggcagttttccatcccatagtgcattaaacta

SEQ ID NO: 18802 - DNA, 80 bp, synthetic construct
  misc_feature 1..80: note = Synthetic: >KJ473808_1-cand-370-449
  source 1..80: mol_type = other DNA
tgttagggtcatatttccgcctactgtgtttgagatgcagttggatggattacagtgggagattgtgcgttttactggtc

SEQ ID NO: 18803 - DNA, 80 bp, synthetic construct
  misc_feature 1..80: note = Synthetic: >KJ473809_1-cand-40-119
  source 1..80: mol_type = other DNA
gttgtggcatatagtactcttgcaccttggtggcttctgagttggtatttgattgctggtctcagtggtgttataccatc

SEQ ID NO: 18804 - DNA, 80 bp, synthetic construct
  misc_feature 1..80: note = Synthetic: >KJ473809_10-cand-0-79
  source 1..80: mol_type = other DNA
cgaatttgtcgttcttgtaaacaacgacacaagttgcctgactgtgggtacttttggcgagagaccacccgatcttaagg

SEQ ID NO: 18805 - DNA, 80 bp, synthetic construct
  misc_feature 1..80: note = Synthetic: >KJ473809_10-cand-80-159
  source 1..80: mol_type = other DNA
gttggctcttgttttctaattgtgacgttgatggcactgctattgtatcatttgatggtctggcaggtgctgaggtttac

SEQ ID NO: 18806 - DNA, 80 bp, synthetic construct
  misc_feature 1..80: note = Synthetic: >KJ473809_10-cand-160-239
  source 1..80: mol_type = other DNA
gtcgacaattatatgtgtgatcagactgggaaacccgttttggccgccgacgtttggactttcaaagattatttcggtga

SEQ ID NO: 18807 - DNA, 80 bp, synthetic construct
  misc_feature 1..80: note = Synthetic: >KJ473809_10-cand-240-319
  source 1..80: mol_type = other DNA
aagtgataccattgttattgatggtgttgtttaccgtaaggcttgggaggttgtgcgtctggatgttccatataaggctc

SEQ ID NO: 18808 - DNA, 80 bp, synthetic construct
  misc_feature 1..80: note = Synthetic: >KJ473809_10-cand-320-399
  source 1..80: mol_type = other DNA
agtctgtttctgctataagctctattgaatggttgtgtggtgttcagcatgtgttgcctagtggcactgtgttggatgtc

SEQ ID NO: 18809 - DNA, 80 bp, synthetic construct
  misc_feature 1..80: note = Synthetic: >KJ473809_10-cand-410-489
  source 1..80: mol_type = other DNA
tctccaagagcaaggttgtgcttttgtctgatccttatgctgacatttatgaccaggttggaagcccttttatgactaat

SEQ ID NO: 18810 - DNA, 80 bp, synthetic construct
  misc_feature 1..80: note = Synthetic: >KJ473809_10-cand-490-569
  source 1..80: mol_type = other DNA
ggaaagaacctgttggaaattgtcgttaaaccatgcttcttgcacggttatgtcaaatgtaactgtggtaacacgcactg

SEQ ID NO: 18811 - DNA, 80 bp, synthetic construct
  misc_feature 1..80: note = Synthetic: >KJ473809_10-cand-570-649
  source 1..80: mol_type = other DNA
ggcagttggtgattggcgagctggttataaatcagtttgttgtggtcttaactgtaatcctatatgtgttgctgctggtt

SEQ ID NO: 18812 - DNA, 80 bp, synthetic construct
  misc_feature 1..80: note = Synthetic: >KJ473809_10-cand-650-729
  source 1..80: mol_type = other DNA
atgttgaacctggtgatgtacttttcacttctaaaggggctggtacgggtctgaagtactataagggtcttactcttaag

SEQ ID NO: 18813 - DNA, 80 bp, synthetic construct
  misc_feature 1..80: note = Synthetic: >KJ473809_10-cand-740-819
  source 1..80: mol_type = other DNA
aagttgagaatgttgctgtttggcgcattcagaaagttcaccatgtggatggttttgttgcttgcaaccgttttaaggat

SEQ ID NO: 18814 - DNA, 80 bp, synthetic construct
  misc_feature 1..80: note = Synthetic: >KJ473809_10-cand-820-899
  source 1..80: mol_type = other DNA
gatttttgctcaaccatggagtcttgtggtgtagagaatgttagtgccaccgctaatgctttgaaatttagccttattag

SEQ ID NO: 18815 - DNA, 80 bp, synthetic construct
  misc_feature 1..80: note = Synthetic: >KJ473809_10-cand-910-989
  source 1..80: mol_type = other DNA
caggaagtcactctgcgttcgattgtcagtggccagcttagtgttgggtttgctgtttttgatacgtttgaagacatttt

SEQ ID NO: 18816 - DNA, 80 bp, synthetic construct
  misc_feature 1..80: note = Synthetic: >KJ473809_10-cand-1000-1079
  source 1..80: mol_type = other DNA
aaatggatgcaaaggctcggtgcacttggttccacactttggtcacaatttaagagctttgcacgtgaaacttttaaaac

SEQ ID NO: 18817 - DNA, 80 bp, synthetic construct
  misc_feature 1..80: note = Synthetic: >KJ473809_10-cand-1080-1159
  source 1..80: mol_type = other DNA
ttcaacatcacttgttgagtttgtgaattttcttcgtgatgttagttgtgtggttatgaatggcgcattggaacttgttg

SEQ ID NO: 18818 - DNA, 80 bp, synthetic construct
  misc_feature 1..80: note = Synthetic: >KJ473809_10-cand-1160-1239
  source 1..80: mol_type = other DNA
ctaatgtgccaaatcactttgcatcactctttgatcacttgcgtgtccttgtggcatctgttacgactctctttattgaa

SEQ ID NO: 18819 - DNA, 80 bp, synthetic construct
  misc_feature 1..80: note = Synthetic: >KJ473809_10-cand-1240-1319
  source 1..80: mol_type = other DNA
gagtttaaggttgcaggtgttgcattcaagcgcttgggtgactatgttttgtttgataatgcactgtgccaacttgcgag

SEQ ID NO: 18820 - DNA, 80 bp, synthetic construct
  misc_feature 1..80: note = Synthetic: >KJ473809_10-cand-1320-1399
  source 1..80: mol_type = other DNA
tgtgaaacttaagggcttcaagcaagatggtttgaaaactgctacttatgttagcacagtttatggacctagtaagcgtg

SEQ ID NO: 18821 - DNA, 80 bp, synthetic construct
  misc_feature 1..80: note = Synthetic: >KJ473809_10-cand-1400-1479
  source 1..80: mol_type = other DNA
ttaaagttaagcgcgttgagaaatgcgatgctaacttagttttgtgtgattctgcacctcttgtggatgaaggttatgct

SEQ ID NO: 18822 - DNA, 80 bp, synthetic construct
  misc_feature 1..80: note = Synthetic: >KJ473809_10-cand-1480-1559
  source 1..80: mol_type = other DNA
tgtgtcattcaaggccaagcattttacacaaatggcacgtattactggtttatgacagatcatacatctgttttggaatc

SEQ ID NO: 18823 - DNA, 80 bp, synthetic construct
  misc_feature 1..80: note = Synthetic: >KJ473809_10-cand-1560-1639
  source 1..80: mol_type = other DNA
acctgtgtttaagaaagacactattgtgtgtcctgatgtactcttggctgtggatggtggtgacattttccacaagtttt

SEQ ID NO: 18824 - DNA, 80 bp, synthetic construct
  misc_feature 1..80: note = Synthetic: >KJ473809_10-cand-1640-1719
  source 1..80: mol_type = other DNA
tgagcacggttacagatgttgttgagttctgtgcttcaattaaagtgcattttggtttggaaggctttgttattacagcc

SEQ ID NO: 18825 - DNA, 80 bp, synthetic construct
  misc_feature 1..80: note = Synthetic: >KJ473809_10-cand-1720-1799
  source 1..80: mol_type = other DNA
gccaagaagtttaaagcttttgctcgcactcttacggagttgtataatgagtttgccattgcagtttctgatgttgttaa

SEQ ID NO: 18826 - DNA, 80 bp, synthetic construct
  misc_feature 1..80: note = Synthetic: >KJ473809_10-cand-1810-1889
  source 1..80: mol_type = other DNA
atgaattttacatactatgcttttaacaaacctatggttgctgtcaatggcacattatgtcctgtagagttagtggagcc

SEQ ID NO: 18827 - DNA, 80 bp, synthetic construct
  misc_feature 1..80: note = Synthetic: >KJ473809_10-cand-1890-1969
  source 1..80: mol_type = other DNA
accttcagatgtttctaaagaagcacttgttacagactttatggtctttaagtcacctgacacacatgttaaacccatta

SEQ ID NO: 18828 - DNA, 80 bp, synthetic construct
  misc_feature 1..80: note = Synthetic: >KJ473809_10-cand-1970-2049
  source 1..80: mol_type = other DNA
ggattgaaacagagtcatgtgagcttcatgaagtggactttgttactccccgtgatggtggtgtggtcaagataatagat

SEQ ID NO: 18829 - DNA, 80 bp, synthetic construct
  misc_feature 1..80: note = Synthetic: >KJ473809_10-cand-2050-2129
  source 1..80: mol_type = other DNA
ggttatgctttttatgagtccaatggcaactattacccttcttctgttgatggtgttaaaaatgtcacataccgtaagaa

SEQ ID NO: 18830 - DNA, 80 bp, synthetic construct
  misc_feature 1..80: note = Synthetic: >KJ473809_10-cand-2130-2209
  source 1..80: mol_type = other DNA
gggtggtggtgttgtcaccttctcagagactaactctgtgaaggaggttgaccctgttcataaggtttatctgacctacg

SEQ ID NO: 18831 - DNA, 80 bp, synthetic construct
  misc_feature 1..80: note = Synthetic: >KJ473809_10-cand-2210-2289
  source 1..80: mol_type = other DNA
agtttgaggacgaagtagttgtggaggttcttaaacagactgtgggttataagatgacctttgaaggacaggagtgggca

SEQ ID NO: 18832 - DNA, 80 bp, synthetic construct
  misc_feature 1..80: note = Synthetic: >KJ473809_10-cand-2290-2369
  source 1..80: mol_type = other DNA
gattttgaagctacacttcgtggtgtcttgtctgttgtctcaactaaactccctatacctgagtactttgtgtacgatga

SEQ ID NO: 18833 - DNA, 80 bp, synthetic construct
  misc_feature 1..80: note = Synthetic: >KJ473809_10-cand-2370-2449
  source 1..80: mol_type = other DNA
ggagggaggttttgattacactaagcctgttatggtttcacagtggcccatacaggtatctgatagtgttgaccatgaga

SEQ ID NO: 18834 - DNA, 80 bp, synthetic construct
  misc_feature 1..80: note = Synthetic: >KJ473809_2-cand-30-109
  source 1..80: mol_type = other DNA
tgtgtatagtctttgcattcatttttgcactttatatgagtgttggtctttttgattttactgagtctgtaccgtcttac

SEQ ID NO: 18835 - DNA, 80 bp, synthetic construct
  misc_feature 1..80: note = Synthetic: >KJ473809_3-cand-0-79
  source 1..80: mol_type = other DNA
aggatgttaagtcatgtgttgttgtttgtgacgctgtttgtgactgtggtaccaaagaccttactattgaaggttgtgtt

SEQ ID NO: 18836 - DNA, 80 bp, synthetic construct
  misc_feature 1..80: note = Synthetic: >KJ473809_3-cand-140-219
  source 1..80: mol_type = other DNA
gctgcttgcactattaaaggtataaaaggtacggccatattttgccaaaaaccaggtcctgccaatgatctatacgttga

SEQ ID NO: 18837 - DNA, 80 bp, synthetic construct
  misc_feature 1..80: note = Synthetic: >KJ473809_3-cand-200-279
  source 1..80: mol_type = other DNA
gccaatgatctatacgttgagccatattgtgctgcatcgtttattggcagtgttactagtgggcattatcgtactaatgt

SEQ ID NO: 18838 - DNA, 80 bp, synthetic construct
  misc_feature 1..80: note = Synthetic: >KJ473809_4-cand-0-79
  source 1..80: mol_type = other DNA
tatgtgggttttctgttgttttgacagttggtcttaaacataagctgctgttcctgtacacgtttttgatacctacggtt

SEQ ID NO: 18839 - DNA, 80 bp, synthetic construct
  misc_feature 1..80: note = Synthetic: >KJ473809_4-cand-50-129
  source 1..80: mol_type = other DNA
ttcctgtacacgtttttgatacctacggttgttttacttgctgccattaatttatcctgggacttttacttacgtgcctt

SEQ ID NO: 18840 - DNA, 80 bp, synthetic construct
  misc_feature 1..80: note = Synthetic: >KJ473809_4-cand-180-259
  source 1..80: mol_type = other DNA
agggtgtgttgaatattgctatttgtgcttttgttagtgggctccatttatatcgttttagtcccaatgttggctcgtgt

SEQ ID NO: 18841 - DNA, 80 bp, synthetic construct
  misc_feature 1..80: note = Synthetic: >KJ473809_4-cand-300-379
  source 1..80: mol_type = other DNA
attggtttgacactgattacttttcaatcattatgacactcttacttaacatgtctagtacatggtatataggtgcaatt

SEQ ID NO: 18842 - DNA, 80 bp, synthetic construct
  misc_feature 1..80: note = Synthetic: >KJ473809_5-cand-150-229
  source 1..80: mol_type = other DNA
agaaaggtgctattgctgacgtggtttgcagacagtactacaagggcatttctgttctacctgcacttactgaccctgct

SEQ ID NO: 18843 - DNA, 80 bp, synthetic construct
  misc_feature 1..80: note = Synthetic: >KJ473809_5-cand-270-349
  source 1..80: mol_type = other DNA
ccttgggggcttttggtggtggtgctgttgctgcacctttttccatagccgtcttttctaagcttaattatattgctttg

SEQ ID NO: 18844 - DNA, 80 bp, synthetic construct
  misc_feature 1..80: note = Synthetic: >KJ473809_5-cand-390-469
  source 1..80: mol_type = other DNA
ccgcgtttaacaatgccatgggtaacatcactaaggcatttactgatgtaaacacagcattgcagcatgtctcagacgct

SEQ ID NO: 18845 - DNA, 80 bp, synthetic construct
  misc_feature 1..80: note = Synthetic: >KJ473809_6-cand-0-79
  source 1..80: mol_type = other DNA
gttcctaaacaactactacctcatgttgtccctattgcgcattttaatctgggtattgattatttatttagcagtgtgtt

SEQ ID NO: 18846 - DNA, 80 bp, synthetic construct
  misc_feature 1..80: note = Synthetic: >KJ473809_6-cand-100-179
  source 1..80: mol_type = other DNA
atcgtggcaatagtattaagactaactgcgccttatttgtttgtcggctacttgtcctttttgtatacgcacctttacta

SEQ ID NO: 18847 - DNA, 80 bp, synthetic construct
  misc_feature 1..80: note = Synthetic: >KJ473809_6-cand-200-279
  source 1..80: mol_type = other DNA
tgatggtagcctcactgcaattatcctgctatgcaggtttttctatgttgcgtactttgctgtgcgttttcatagctttt

SEQ ID NO: 18848 - DNA, 80 bp, synthetic construct
  misc_feature 1..80: note = Synthetic: >KJ473809_6-cand-250-329
  source 1..80: mol_type = other DNA
cgtactttgctgtgcgttttcatagcttttactttgtcttacttaatagcccaacattagcttgggtgtttggaaaggcg

SEQ ID NO: 18849 - DNA, 80 bp, synthetic construct
  misc_feature 1..80: note = Synthetic: >KJ473809_6-cand-350-429
  source 1..80: mol_type = other DNA
ctacacgtgtttacgtgggggtgactcttatgttcgttttgggcctcattttgtcccctttgttagcgatagaaacttat

SEQ ID NO: 18850 - DNA, 80 bp, synthetic construct
  misc_feature 1..80: note = Synthetic: >KJ473809_6-cand-450-529
  source 1..80: mol_type = other DNA
gtgcaaaaagacgtctgtttggttaggcgtgttgagcttattaatggcgactttttgtacatctttgctagcgagcctgc

SEQ ID NO: 18851 - DNA, 80 bp, synthetic construct
  misc_feature 1..80: note = Synthetic: >KJ473809_7-cand-0-79
  source 1..80: mol_type = other DNA
caaggaaatcgctctagatcgcagtccaacaacagggctcaatctaacaacagatctcagagcagaggacgtcagaatca

SEQ ID NO: 18852 - DNA, 80 bp, synthetic construct
  misc_feature 1..80: note = Synthetic: >KJ473809_7-cand-90-169
  source 1..80: mol_type = other DNA
aatcagcccacaggagatggtggatcaaatggtcaacgtaaccagcctcgcaatagatctaactcacggaaccgtagtgg

SEQ ID NO: 18853 - DNA, 80 bp, synthetic construct
  misc_feature 1..80: note = Synthetic: >KJ473809_7-cand-180-259
  source 1..80: mol_type = other DNA
cgcaatggcggaagccaacaagacttggttgctgccgtccgtgaggctcttgctggaatgggattcaagccaaatacctc

SEQ ID NO: 18854 - DNA, 80 bp, synthetic construct
  misc_feature 1..80: note = Synthetic: >KJ473809_7-cand-270-349
  source 1..80: mol_type = other DNA
agaaacacccctgtgaaggtgcctaagggtgacaaacccttaaataaacctaccaaagcaccagcttcgcaggttgagaa

SEQ ID NO: 18855 - DNA, 80 bp, synthetic construct
  misc_feature 1..80: note = Synthetic: >KJ473809_7-cand-360-439
  source 1..80: mol_type = other DNA
aagagaactccgcactcccaggagaatgtggaagtgtgcttcggtccacgcgacacctaccaaaattttggtgatagtca

SEQ ID NO: 18856 - DNA, 80 bp, synthetic construct
  misc_feature 1..80: note = Synthetic: >KJ473809_7-cand-450-529
  source 1..80: mol_type = other DNA
cttggtgttgattatcctcactacccgcagattggcgagctgatccccagtcaagctgcacttctttttggcagtgaaat

SEQ ID NO: 18857 - DNA, 80 bp, synthetic construct
  misc_feature 1..80: note = Synthetic: >KJ473809_7-cand-530-609
  source 1..80: mol_type = other DNA
tactgctcatgagcgaggcgataacatccaacttacctacatctacaagatggaggtgcctaaggatcataagtcacttg

SEQ ID NO: 18858 - DNA, 80 bp, synthetic construct
  misc_feature 1..80: note = Synthetic: >KJ473809_7-cand-620-699
  source 1..80: mol_type = other DNA
gccacacattggtgcttatgctgattccaccgaggatgttacactaccaccagctctgcccccaaaacagcaacgcctcc

SEQ ID NO: 18859 - DNA, 80 bp, synthetic construct
  misc_feature 1..80: note = Synthetic: >KJ473809_7-cand-710-789
  source 1..80: mol_type = other DNA
tagtactgaagtacttgctgacaccacttctgttgtagacgaagaagaggtggaggaggttgttgatgatgttactggtc

SEQ ID NO: 18860 - DNA, 80 bp, synthetic construct
  misc_feature 1..80: note = Synthetic: >KJ473809_7-cand-900-979
  source 1..80: mol_type = other DNA
ttaataccacccctgagcattgtgacagtttcacctttggtgatactgaaaaattaaggcgcaggtgcattcaaaatgta

SEQ ID NO: 18861 - DNA, 80 bp, synthetic construct
  misc_feature 1..80: note = Synthetic: >KJ473809_7-cand-990-1069
  source 1..80: mol_type = other DNA
ccctgggcatgtaccttaatttggtgcagactgtccagacgcctgatggtcctattacctttgccattgacagacccaat

SEQ ID NO: 18862 - DNA, 80 bp, synthetic construct
  misc_feature 1..80: note = Synthetic: >KJ473809_7-cand-1080-1159
  source 1..80: mol_type = other DNA
ctatctatgacatgtcaaaggttgacaaggaccacactgtcacaatctcaaccccgcagggatccatcagtgttaatgtc

SEQ ID NO: 18863 - DNA, 80 bp, synthetic construct
  misc_feature 1..80: note = Synthetic: >KJ473809_7-cand-1160-1239
  source 1..80: mol_type = other DNA
ggcgagagttttctctcagaagccccatatgctgaggatgctgcaactagtgattaagtaagaagaaaaatctgaacaga

SEQ ID NO: 18864 - DNA, 80 bp, synthetic construct
  misc_feature 1..80: note = Synthetic: >KJ473809_7-cand-1250-1329
  source 1..80: mol_type = other DNA
ttaagtgctgcaagattcgctagaactacgctagcgtctcggtcttgtgcacaacggtaagccagtggtcatgtcagcac

SEQ ID NO: 18865 - DNA, 80 bp, synthetic construct
  misc_feature 1..80: note = Synthetic: >KJ473809_7-cand-1340-1419
  source 1..80: mol_type = other DNA
atgaccatgttgctttgacgagtcgaacgcaatacatgctatttaagtgtaacccagaatgagtacaaagatccgctatg

SEQ ID NO: 18866 - DNA, 80 bp, synthetic construct
  misc_feature 1..80: note = Synthetic: >KJ473809_8-cand-0-79
  source 1..80: mol_type = other DNA
aggtgaggttgccttgctcgaaaatgcttataattgtattttcgatcaggacggtgtccctctaacccctcttattggtg

SEQ ID NO: 18867 - DNA, 80 bp, synthetic construct
  misc_feature 1..80: note = Synthetic: >KJ473809_8-cand-80-159
  source 1..80: mol_type = other DNA
tggggatttttaaggttcctattacaacatccttgaaggctttgcttgatgttgtaggcgataggcaatgtaggtgtttt

SEQ ID NO: 18868 - DNA, 80 bp, synthetic construct
  misc_feature 1..80: note = Synthetic: >KJ473809_8-cand-160-239
  source 1..80: mol_type = other DNA
tgctattcagatagtgaagttgctgcaattgttgcctatgtcaacaacatgtcagctgtagatgatgttcagctgcctgt

SEQ ID NO: 18869 - DNA, 80 bp, synthetic construct
  misc_feature 1..80: note = Synthetic: >KJ473809_8-cand-240-319
  source 1..80: mol_type = other DNA
gtgtccacctttaacaccttgtagggttgaaggtgacgtctcattttacatgggtagtgtggatgttttgctacaacagt

SEQ ID NO: 18870 - DNA, 80 bp, synthetic construct
  misc_feature 1..80: note = Synthetic: >KJ473809_8-cand-320-399
  source 1..80: mol_type = other DNA
cctttgataggtttgttttctttgttagtgaggatctgcaactttgcgtcttagctagtgcattagacgtttatttgaat

SEQ ID NO: 18871 - DNA, 80 bp, synthetic construct
  misc_feature 1..80: note = Synthetic: >KJ473809_8-cand-400-479
  source 1..80: mol_type = other DNA
ggctgtgtcacagaggctttaaataagtctggtccattgccagctggtaacatagtctcttacaaacatcctaaaggtga

SEQ ID NO: 18872 - DNA, 80 bp, synthetic construct
  misc_feature 1..80: note = Synthetic: >KJ473809_8-cand-480-559
  source 1..80: mol_type = other DNA
tggttttgttgtcgtgacttttgcagttttgcctgctgttggctcaaaggattttgacaaaaatgttaaacgtgttttta

SEQ ID NO: 18873 - DNA, 80 bp, synthetic construct
  misc_feature 1..80: note = Synthetic: >KJ473809_8-cand-560-639
  source 1..80: mol_type = other DNA
acaagttgtctaagcttaaaggcaatattctttctactgtgtctagtgttatgtttgcgcgtctaacacgtgtctggaag

SEQ ID NO: 18874 - DNA, 80 bp, synthetic construct
  misc_feature 1..80: note = Synthetic: >KJ473809_8-cand-640-719
  source 1..80: mol_type = other DNA
tctttttggctttgtgattctagtgttagtgttgttgacgaacacttttcagagactagtgtttttgttgtcgttaccga

SEQ ID NO: 18875 - DNA, 80 bp, synthetic construct
  misc_feature 1..80: note = Synthetic: >KJ473809_8-cand-720-799
  source 1..80: mol_type = other DNA
gaatggtagagactttgaaactgtggctcttgacacagccaaaacttttgtggagcaggttggtgtttgcactattgata

SEQ ID NO: 18876 - DNA, 80 bp, synthetic construct
  misc_feature 1..80: note = Synthetic: >KJ473809_8-cand-800-879
  source 1..80: mol_type = other DNA
atgtagatgtaacaaatgctgttgttacgcctactgatgaacctgttagtgttgctacaccgtctgttgattgggatgcg

SEQ ID NO: 18877 - DNA, 80 bp, synthetic construct
  misc_feature 1..80: note = Synthetic: >KJ473809_8-cand-880-959
  source 1..80: mol_type = other DNA
ttctacggctttgagaatgctagtgtttttcacactttggaccatagtggttttgagtttgagagtacagtcgtagaagg

SEQ ID NO: 18878 - DNA, 80 bp, synthetic construct
  misc_feature 1..80: note = Synthetic: >KJ473809_8-cand-960-1039
  source 1..80: mol_type = other DNA
taaacgcactcttaagagttcagataacaactgctgggttaatgctgtttgcttgcaattgcagtacttggatgcaaagt

SEQ ID NO: 18879 - DNA, 80 bp, synthetic construct
  misc_feature 1..80: note = Synthetic: >KJ473809_8-cand-1040-1119
  source 1..80: mol_type = other DNA
ttgttagtgagggtcttaacgctatgtgggactcttacgtgactggtaatgtttctaagtttgtccactggttgtactgg

SEQ ID NO: 18880 - DNA, 80 bp, synthetic construct
  misc_feature 1..80: note = Synthetic: >KJ473809_8-cand-1120-1199
  source 1..80: mol_type = other DNA
attacagatcacagcaagaatgaccgcaatgatgcagaaagtgtgttgttgcgtttgtctgtttacctatgtaagtcttg

SEQ ID NO: 18881 - DNA, 80 bp, synthetic construct
  misc_feature 1..80: note = Synthetic: >KJ473809_8-cand-1200-1279
  source 1..80: mol_type = other DNA
tgtcttcaccatagaacgtgaaacttcatcattgtgctgttctgaattgcgcacgtacaacgcttgtgttgttagtgcga

SEQ ID NO: 18882 - DNA, 80 bp, synthetic construct
  misc_feature 1..80: note = Synthetic: >KJ473809_8-cand-1280-1359
  source 1..80: mol_type = other DNA
gtgtgttaaggaatggtgttagtgatggtgtttgtaaacatggtgatgcctacaagagtagggtttctgctgttgatgga

SEQ ID NO: 18883 - DNA, 80 bp, synthetic construct
  misc_feature 1..80: note = Synthetic: >KJ473809_8-cand-1360-1439
  source 1..80: mol_type = other DNA
attggtatagtagttagtgtttctatacctgatcctgtgcctaagagtgccttgttggatggtgtttcttacactacttt

SEQ ID NO: 18884 - DNA, 80 bp, synthetic construct
  misc_feature 1..80: note = Synthetic: >KJ473809_8-cand-1440-1519
  source 1..80: mol_type = other DNA
tacaggtgatgttggtagtggccattatgctgttgtggatcggaaactttataagtcatttgatgggtttgatgttaaac

SEQ ID NO: 18885 - DNA, 80 bp, synthetic construct
  misc_feature 1..80: note = Synthetic: >KJ473809_8-cand-1520-1599
  source 1..80: mol_type = other DNA
ctgcttcgttgtcatctgttagtgtgacaggtgttgtcgtcaagactgcaaagtttacgcgcaaagtcaaacaagttgcc

SEQ ID NO: 18886 - DNA, 80 bp, synthetic construct
  misc_feature 1..80: note = Synthetic: >KJ473809_8-cand-1600-1679
  source 1..80: mol_type = other DNA
acacctactgttagttctggagatgcacctttggatttgtcaacaactctgaatacagctgccagtaagtttttcagtgt

SEQ ID NO: 18887 - DNA, 80 bp, synthetic construct
  misc_feature 1..80: note = Synthetic: >KJ473809_8-cand-1680-1759
  source 1..80: mol_type = other DNA
tggcgacgttgtagctcgcaatgttggtatgttttgtgtctggctttttagtatgctgactctgctttttaaaactttta

SEQ ID NO: 18888 - DNA, 80 bp, synthetic construct
  misc_feature 1..80: note = Synthetic: >KJ473809_8-cand-1760-1839
  source 1..80: mol_type = other DNA
aaaagagagactttagtgtgttagctttagcacctcagcgtacaggagttatatttaggaggagtcttaagtataatagt

SEQ ID NO: 18889 - DNA, 80 bp, synthetic construct
  misc_feature 1..80: note = Synthetic: >KJ473809_8-cand-1840-1919
  source 1..80: mol_type = other DNA
aaagccgcctataaacatttaaattcgaagtggggcactgtaaagtttgtcatgaagttgcttgtcatgttttatacatt

SEQ ID NO: 18890 - DNA, 80 bp, synthetic construct
  misc_feature 1..80: note = Synthetic: >KJ473809_8-cand-1920-1999
  source 1..80: mol_type = other DNA
gtacatgttgcttttcttgacagtgcgttttagtcctttgaacagtgtgttttgtgatgactatgttgatggctattaca

SEQ ID NO: 18891 - DNA, 80 bp, synthetic construct
  misc_feature 1..80: note = Synthetic: >KJ473809_8-cand-2000-2079
  source 1..80: mol_type = other DNA
attctacatttgtgaagagtgactactgtgatggcttggtctgtaaagtgtgtctttatggttaccaggagttatctgac

SEQ ID NO: 18892 - DNA, 80 bp, synthetic construct
  misc_feature 1..80: note = Synthetic: >KJ473809_8-cand-2080-2159
  source 1..80: mol_type = other DNA
tttccccacttggacttgacatgggagtttataacgcatccacttttagtgagttttatgcctcttttatatatggcatt

SEQ ID NO: 18893 - DNA, 80 bp, synthetic construct
  misc_feature 1..80: note = Synthetic: >KJ473809_9-cand-0-79
  source 1..80: mol_type = other DNA
caccccacttaagccatgtataaaacattccttttggttgtttttacagtgactgttgttcactgtcaaaatgcttgcaa

SEQ ID NO: 18894 - DNA, 80 bp, synthetic construct
  misc_feature 1..80: note = Synthetic: >KJ473809_9-cand-80-159
  source 1..80: mol_type = other DNA
ccaagttttgccgggtatgaaaattaacttaggcttacctcccagtacgtcatcctttgtgtctggttacctacctactc

SEQ ID NO: 18895 - DNA, 80 bp, synthetic construct
  misc_feature 1..80: note = Synthetic: >KJ473809_9-cand-160-239
  source 1..80: mol_type = other DNA
ctggtaattggacttgtagaaacgggggcaccacaaagctgcaagggcatgcaagggctgtttttatgcgttattatgca

SEQ ID NO: 18896 - DNA, 80 bp, synthetic construct
  misc_feature 1..80: note = Synthetic: >KJ473809_9-cand-240-319
  source 1..80: mol_type = other DNA
tatgctagagcctggtcattcggtgttggtccttctaccaccatcgatggtcactacggtttgtatgtctggcattctaa

SEQ ID NO: 18897 - DNA, 80 bp, synthetic construct
  misc_feature 1..80: note = Synthetic: >KJ473809_9-cand-320-399
  source 1..80: mol_type = other DNA
tagtgctggtcatatgaccgttcgcatatgccgttggtaccaagacagagaccctattgcgcagaattccccacatgata

SEQ ID NO: 18898 - DNA, 80 bp, synthetic construct
  misc_feature 1..80: note = Synthetic: >KJ473809_9-cand-400-479
  source 1..80: mol_type = other DNA
caacctctagtgactgtattttgaacgtgcgtcagccatatgtgtttacacatgctggctttcaggtcataggtgtgtca

SEQ ID NO: 18899 - DNA, 80 bp, synthetic construct
  misc_feature 1..80: note = Synthetic: >KJ473809_9-cand-490-569
  source 1..80: mol_type = other DNA
aagctgttactgtttatggcaagagtaaactgtaccgcttatacgtcccaggtgcaagtttgtggaactctgttgctttt

SEQ ID NO: 18900 - DNA, 80 bp, synthetic construct
  misc_feature 1..80: note = Synthetic: >KJ473809_9-cand-570-649
  source 1..80: mol_type = other DNA
acttgttccaaggacgattcctgtggtcaccaaataattactaagcctatcacagtgaatgctactactgatgacaaagg

SEQ ID NO: 18901 - DNA, 80 bp, synthetic construct
  misc_feature 1..80: note = Synthetic: >KJ473809_9-cand-650-729
  source 1..80: mol_type = other DNA
tgtcattacatcgtacacagtttgtgaccgttgcgatggtttcccgcaccatgtttttgctgtgcaagaaggaggtaaga

SEQ ID NO: 18902 - DNA, 80 bp, synthetic construct
  misc_feature 1..80: note = Synthetic: >KJ473809_9-cand-730-809
  source 1..80: mol_type = other DNA
tacctggtagttttgattttacaaattggttttacttgactaacacatcgtcaccttttgacggtcgttttgtctcaaac

SEQ ID NO: 18903 - DNA, 80 bp, synthetic construct
  misc_feature 1..80: note = Synthetic: >KJ473809_9-cand-810-889
  source 1..80: mol_type = other DNA
caaccgttgcagattcagtgcttatggccgattcctgctttgacatcaactacaggtatcatctactttaattcctcacg

SEQ ID NO: 18904 - DNA, 80 bp, synthetic construct
  misc_feature 1..80: note = Synthetic: >KJ473809_9-cand-890-969
  source 1..80: mol_type = other DNA
ctttacagacccgcaccagcgctgtaatggctacaatgaagttggaggcttagccgaccacttgaggtttgctatcaatg

SEQ ID NO: 18905 - DNA, 80 bp, synthetic construct
  misc_feature 1..80: note = Synthetic: >KJ473809_9-cand-980-1059
  source 1..80: mol_type = other DNA
aggtgctttccagctaggtgttatctcgttgctggctgttcataatgcgtacaatttctcttgtagtaatatttctaact

SEQ ID NO: 18906 - DNA, 80 bp, synthetic construct
  misc_feature 1..80: note = Synthetic: >KJ473809_9-cand-1060-1139
  source 1..80: mol_type = other DNA
ttgttgacgctactactattggtgtgccgtttggtaagacttaccaaccatactattgttttgtcacagaaggttacaat

SEQ ID NO: 18907 - DNA, 80 bp, synthetic construct
  misc_feature 1..80: note = Synthetic: >KJ473809_9-cand-1140-1219
  source 1..80: mol_type = other DNA
atttctgctaatcgcacatttgttggtgttatgccttctgatgtgagagaaattgtggtttcgcgttatgggtctgttta

SEQ ID NO: 18908 - DNA, 80 bp, synthetic construct
  misc_feature 1..80: note = Synthetic: >KJ473809_9-cand-1220-1299
  source 1..80: mol_type = other DNA
cattaatggttacaagatttttaatgtaggcgagctttatggtgttgtcttgaacttttccagcctcactggctcagact

SEQ ID NO: 18909 - DNA, 80 bp, synthetic construct
  misc_feature 1..80: note = Synthetic: >KJ473809_9-cand-1300-1379
  source 1..80: mol_type = other DNA
tttggactgtcgcctacgccaatgaggtcaatgtgcttgttgatattgaggagacttatatcactggcattttgtattgt

SEQ ID NO: 18910 - DNA, 80 bp, synthetic construct
  misc_feature 1..80: note = Synthetic: >KJ473809_9-cand-1380-1459
  source 1..80: mol_type = other DNA
gacacacctttgaaccgccttaagtgtcaacagcagaggttctttatggatgatggcttttactcagctatagatcttgc

SEQ ID NO: 18911 - DNA, 80 bp, synthetic construct
  misc_feature 1..80: note = Synthetic: >KJ473809_9-cand-1460-1539
  source 1..80: mol_type = other DNA
acccccagttgtgcagactatagtgttgctgcctgaatacactggtttgactaacatcacactagatgtgaatgttactt

SEQ ID NO: 18912 - DNA, 80 bp, synthetic construct
  misc_feature 1..80: note = Synthetic: >KJ473809_9-cand-1540-1619
  source 1..80: mol_type = other DNA
tcaaccctccatcatgcatccaatgtgcacctactgttaatagcattttgctgaatggtgagtctggtggtagtgtttgt

SEQ ID NO: 18913 - DNA, 80 bp, synthetic construct
  misc_feature 1..80: note = Synthetic: >KJ473809_9-cand-1620-1699
  source 1..80: mol_type = other DNA
gtctccactaatagatttagtgttgatttcaaactcaccgtgaactcgcaggcttacgacatcggtgttagaactggaag

SEQ ID NO: 18914 - DNA, 80 bp, synthetic construct
  misc_feature 1..80: note = Synthetic: >KJ473809_9-cand-1700-1779
  source 1..80: mol_type = other DNA
ttgtcctttttcctatggctcacttaacaattttgttaagtttgggagtatttgtttttcattagtggacaatggtggct

SEQ ID NO: 18915 - DNA, 80 bp, synthetic construct
  misc_feature 1..80: note = Synthetic: >KJ473809_9-cand-1780-1859
  source 1..80: mol_type = other DNA
gtcctatgcctatcaacgccattaattacattaaaattgaataccctattggggtcctctatgtaactcactctcctggt

SEQ ID NO: 18916 - DNA, 80 bp, synthetic construct
  misc_feature 1..80: note = Synthetic: >KJ473809_9-cand-1860-1939
  source 1..80: mol_type = other DNA
gaggctatcacaggggttcctaagggtttcattaaaagactgggcttcttagatgctagtattttgcatcttaatgtttg

SEQ ID NO: 18917 - DNA, 80 bp, synthetic construct
  misc_feature 1..80: note = Synthetic: >KJ473809_9-cand-1940-2019
  source 1..80: mol_type = other DNA
cacagagtacaacatttatggcattgtgggcaaaggcattattaataaggctaacagtacattgcatactggcatagttt

SEQ ID NO: 18918 - DNA, 80 bp, synthetic construct
  misc_feature 1..80: note = Synthetic: >KJ473809_9-cand-2020-2099
  source 1..80: mol_type = other DNA
atactgatactgctggtgtgcttgttagctttaagaatgtgactacgggtgacatctacagtgtcataccatgccagacc

SEQ ID NO: 18919 - DNA, 80 bp, synthetic construct
  misc_feature 1..80: note = Synthetic: >KJ473809_9-cand-2100-2179
  source 1..80: mol_type = other DNA
tcaatgcagtatgcggtgattgctgataacattgttggtgttatctcagcagacactgcaactggcatcacattcaatca

SEQ ID NO: 18920 - DNA, 80 bp, synthetic construct
  misc_feature 1..80: note = Synthetic: >KJ473809_9-cand-2180-2259
  source 1..80: mol_type = other DNA
tacaattgccacaccgatgttctattattcaacaaacactgaccgtaattgcacagagccagtacttacatatgctacta

SEQ ID NO: 18921 - DNA, 80 bp, synthetic construct
  misc_feature 1..80: note = Synthetic: >KJ473810_10-cand-0-79
  source 1..80: mol_type = other DNA
tttgccagaaccagttagtagtaagaactggatatgccctgttaaaccacttgaagaatatggtgttaactactttagta

SEQ ID NO: 18922 - DNA, 80 bp, synthetic construct
  misc_feature 1..80: note = Synthetic: >KJ473810_10-cand-70-149
  source 1..80: mol_type = other DNA
tactttagtaaccttagaggtatatggtggtcctactacagtggtaataagggtgtagaacttggtattgctgcttctaa

SEQ ID NO: 18923 - DNA, 80 bp, synthetic construct
  misc_feature 1..80: note = Synthetic: >KJ473810_10-cand-160-239
  source 1..80: mol_type = other DNA
aatcccaatcagtgggccttgtatatgtaccaaaataataatgctacatttaatggttcacaaggtgttctttactttcg

SEQ ID NO: 18924 - DNA, 80 bp, synthetic construct
  misc_feature 1..80: note = Synthetic: >KJ473810_10-cand-250-329
  source 1..80: mol_type = other DNA
tacgcaggtaaatatacacctgtgggtaacccagacaagctagttagcaaagtttgtttgattgacaaaaaggtcagttt

SEQ ID NO: 18925 - DNA, 80 bp, synthetic construct
  misc_feature 1..80: note = Synthetic: >KJ473810_10-cand-340-419
  source 1..80: mol_type = other DNA
gagaaagctaaccaagtaataggtgtcacgtggtctggtaactatgtgactttctatggtattgaacgatcttttagaat

SEQ ID NO: 18926 - DNA, 80 bp, synthetic construct
  misc_feature 1..80: note = Synthetic: >KJ473810_10-cand-530-609
  source 1..80: mol_type = other DNA
aaggtttgattaaaaattatagtgtttgcaaagaatgtaatggctttccagcacatgtttttcctgttttggatggtggc

SEQ ID NO: 18927 - DNA, 80 bp, synthetic construct
  misc_feature 1..80: note = Synthetic: >KJ473810_10-cand-620-699
  source 1..80: mol_type = other DNA
gtgattttagtttcgacaattggtttcttctcactaatagttctactatagtgaatgggaaaatagtcgacatacaacca

SEQ ID NO: 18928 - DNA, 80 bp, synthetic construct
  misc_feature 1..80: note = Synthetic: >KJ473810_10-cand-710-789
  source 1..80: mol_type = other DNA
tttgtctgtggcctatccctgcactagattcaaatgatgataaaatttattttaacatcactggtgcaaattgtaatggc

SEQ ID NO: 18929 - DNA, 80 bp, synthetic construct
  misc_feature 1..80: note = Synthetic: >KJ473810_10-cand-800-879
  source 1..80: mol_type = other DNA
aggatgcctatgcagatgtgcttcgtttttcactgaattttactaacagccaagtttttaatggtattcatagtgttact

SEQ ID NO: 18930 - DNA, 80 bp, synthetic construct
  misc_feature 1..80: note = Synthetic: >KJ473810_10-cand-890-969
  source 1..80: mol_type = other DNA
ttggcggtgatttaaaattcagttgttctaatacaagtacatatacagctgaagacgaagttttaccttttggacctcta

SEQ ID NO: 18931 - DNA, 80 bp, synthetic construct
  misc_feature 1..80: note = Synthetic: >KJ473810_11-cand-170-249
  source 1..80: mol_type = other DNA
tttgtgactagtctgaaaagccttgtatttacaagtgctcagttggtcgaacttactaaagcactctcaaaagccgtgtt

SEQ ID NO: 18932 - DNA, 80 bp, synthetic construct
  misc_feature 1..80: note = Synthetic: >KJ473810_11-cand-350-429
  source 1..80: mol_type = other DNA
tttacagtaaacagtgtcaaaattgcaggccgtagcttcaaaagcattggttcttatgttctgtttgacaatgctataat

SEQ ID NO: 18933 - DNA, 80 bp, synthetic construct
  misc_feature 1..80: note = Synthetic: >KJ473810_11-cand-430-509
  source 1..80: mol_type = other DNA
taaatttgtggcagtcaaggttaaaggccttcatcaagcaggaattaaatctactgaatatgctacgtccatcattggca

SEQ ID NO: 18934 - DNA, 80 bp, synthetic construct
  misc_feature 1..80: note = Synthetic: >KJ473810_11-cand-520-599
  source 1..80: mol_type = other DNA
agttaattccaaaagaacagaaagtgcagatgtgaatctcgtacttgtcaatgacaaacaaccactactgaaggatggtg

SEQ ID NO: 18935 - DNA, 80 bp, synthetic construct
  misc_feature 1..80: note = Synthetic: >KJ473810_11-cand-610-689
  source 1..80: mol_type = other DNA
aattggtggaaaatcattcttttacagtggaggtgtctatagacttatgagtgataataactctgtgcttgatgaacctg

SEQ ID NO: 18936 - DNA, 80 bp, synthetic construct
  misc_feature 1..80: note = Synthetic: >KJ473810_2-cand-0-79
  source 1..80: mol_type = other DNA
tgtattggctactacctttgattaccatgtctcacttttgagcttggatattcagggtgttatcaatgtttcagcttgtg

SEQ ID NO: 18937 - DNA, 80 bp, synthetic construct
  misc_feature 1..80: note = Synthetic: >KJ473810_2-cand-130-209
  source 1..80: mol_type = other DNA
tactcttctgttattacctattgctgttcattgttgtttgtggcctatggattttatatgggatcagatgctcttagtct

SEQ ID NO: 18938 - DNA, 80 bp, synthetic construct
  misc_feature 1..80: note = Synthetic: >KJ473810_3-cand-130-209
  source 1..80: mol_type = other DNA
gctttaatcacaggtgactcttacacattgtactctggtgatgtcaaagatggacattacacagtgtttagtgtaaaggg

SEQ ID NO: 18939 - DNA, 80 bp, synthetic construct
  misc_feature 1..80: note = Synthetic: >KJ473810_4-cand-140-219
  source 1..80: mol_type = other DNA
atgtacaatcttttaagtgttttctcatcatctttctctgttatggctatgtctggtcaaattgtgctgaattgtgcagt

SEQ ID NO: 18940 - DNA, 80 bp, synthetic construct
  misc_feature 1..80: note = Synthetic: >KJ473810_4-cand-250-329
  source 1..80: mol_type = other DNA
tgtgaccaagtttaagagaatgtttggtgacttgtcattgggtgtctgttctgtgatctgtgttgcaattgtaaacaatt

SEQ ID NO: 18941 - DNA, 80 bp, synthetic construct
  misc_feature 1..80: note = Synthetic: >KJ473810_5-cand-250-329
  source 1..80: mol_type = other DNA
aatggtggcagtcagttttgctgtacttccaattgctggtgccgcttcttatgataagaacgtcacacgcacaattaata

SEQ ID NO: 18942 - DNA, 80 bp, synthetic construct
  misc_feature 1..80: note = Synthetic: >KJ473810_5-cand-350-429
  source 1..80: mol_type = other DNA
aatgtcttctccactgtaccacctacaagtgtcttgaaaaacatgcttaaatgttgtaattgttccttcgttgtttcgca

SEQ ID NO: 18943 - DNA, 80 bp, synthetic construct
  misc_feature 1..80: note = Synthetic: >KJ473810_6-cand-0-79
  source 1..80: mol_type = other DNA
ctgggttgcatcagctcttgtccaattgcagcttttagacatctacaatgactacgcatacgatttctttaaaatcggtc

SEQ ID NO: 18944 - DNA, 80 bp, synthetic construct
  misc_feature 1..80: note = Synthetic: >KJ473810_6-cand-110-189
  source 1..80: mol_type = other DNA
aatgtacaggaaacattagaggatctgctggtgatacatctcattgtcttgaaaagattttgagtgggttacacaccatg

SEQ ID NO: 18945 - DNA, 80 bp, synthetic construct
  misc_feature 1..80: note = Synthetic: >KJ473810_6-cand-230-309
  source 1..80: mol_type = other DNA
ctgaagaaatgagtggatgtgtctttagattcatgccaactgcgaaagcatttccatatggtggctgtgcgtcttgtggt

SEQ ID NO: 18946 - DNA, 80 bp, synthetic construct; identical to SEQ ID NO: 18772
  misc_feature 1..80: note = Synthetic: >KJ473810_7-cand-0-79
  source 1..80: mol_type = other DNA

SEQ ID NO: 18947 - DNA, 80 bp, synthetic construct
  misc_feature 1..80: note = Synthetic: >KJ473810_7-cand-100-179
  source 1..80: mol_type = other DNA
tcaaaattcaaatgactctgccgtagacattgttgctgctgtgaaacaggctctgaaagagcttggtgtaacaaatgaaa

SEQ ID NO: 18948 - DNA, 80 bp, synthetic construct
  misc_feature 1..80: note = Synthetic: >KJ473810_7-cand-200-279
  source 1..80: mol_type = other DNA
agtggtactactactcctaaagaacaacgttctaaatcacctgtaagatcaccaacagtgcaaaagaaacagttggaaag

SEQ ID NO: 18949 - DNA, 80 bp, synthetic construct
  misc_feature 1..80: note = Synthetic: >KJ473810_7-cand-440-519
  source 1..80: mol_type = other DNA
attctttttggtggtgaagttgttactaaagaagttggctcagatgttgaaatcacctacatctataagatgaaggtgcc

SEQ ID NO: 18950 - DNA, 80 bp, synthetic construct
  misc_feature 1..80: note = Synthetic: >KJ473810_8-cand-130-209
  source 1..80: mol_type = other DNA
tacgctttgcttatctgggctattacagttataagtacaaaagtttctcttttctggtgttaaacaccagtaaagtggct

SEQ ID NO: 18951 - DNA, 80 bp, synthetic construct
  misc_feature 1..80: note = Synthetic: >KJ473810_8-cand-230-309
  source 1..80: mol_type = other DNA
gtattatgatgaatcaccttatgttgtgctttatggtggagatcaccatgtgcaattcggtgaatacatgataccttttg

SEQ ID NO: 18952 - DNA, 80 bp, synthetic construct
  misc_feature 1..80: note = Synthetic: >KJ473810_9-cand-0-79
  source 1..80: mol_type = other DNA
acgtaccgcgcacttatgttgctctgccctatcatgctactcattcatttgttaatttgacagtgcatttagggcagggt

SEQ ID NO: 18953 - DNA, 80 bp, synthetic construct
  misc_feature 1..80: note = Synthetic: >KJ473810_9-cand-90-169
  source 1..80: mol_type = other DNA
ctgcttatgcgcagattaatggtgttaacgactcatattgtgtcaatactacacagtttactaccaattttgaacagttg

SEQ ID NO: 18954 - DNA, 80 bp, synthetic construct
  misc_feature 1..80: note = Synthetic: >KJ473810_9-cand-180-259
  source 1..80: mol_type = other DNA
acaatgtgaaagcagtgatgcaaaatggtgattgtccttttaattttgacagtttaaacaacttcctcagctttgatagt

SEQ ID NO: 18955 - DNA, 80 bp, synthetic construct
  misc_feature 1..80: note = Synthetic: >KJ473810_9-cand-270-349
  source 1..80: mol_type = other DNA
atttacaacctgttggttctagctgtacaatttctattatgagaagctggatgggttttaatgcaccctggagaagtatt

SEQ ID NO: 18956 - DNA, 80 bp, synthetic construct
  misc_feature 1..80: note = Synthetic: >KJ473810_9-cand-360-439
  source 1..80: mol_type = other DNA
ttaaaagaggcaatcgtattacaggtgttaaaactgctagtactggcatttttgatcctagtgttatggaattagataat

SEQ ID NO: 18957 - DNA, 80 bp, synthetic construct
  misc_feature 1..80: note = Synthetic: >KJ473810_9-cand-560-639
  source 1..80: mol_type = other DNA
gcaactacaggtgaagtgttttcagttacaccatgtcagcttactatgcaggctgctgttgttaatgacgacattgttgg

SEQ ID NO: 18958 - DNA, 80 bp, synthetic construct
  misc_feature 1..80: note = Synthetic: >KJ473810_9-cand-650-729
  source 1..80: mol_type = other DNA
tcaactaacgcttctagtatacctttttcgcacaccattactacgaaaacattctattaccataccaatgtgcaacaaaa

SEQ ID NO: 18959 - DNA, 80 bp, synthetic construct
  misc_feature 1..80: note = Synthetic: >KJ473811_2-cand-0-79
  source 1..80: mol_type = other DNA
tgtgttggtgacaggacgtttccttcgctttaacaccactcttacgtggtacaattcatggaaccaggcttattcttcac

SEQ ID NO: 18960 - DNA, 80 bp, synthetic construct
  misc_feature 1..80: note = Synthetic: >KJ473811_2-cand-690-769
  source 1..80: mol_type = other DNA
tgagctaaagtgcacactcaagcagtttgatgtaggtaaaggtatttaccaaacgtcaaacttccgagttcaacctactg

SEQ ID NO: 18961 - DNA, 80 bp, synthetic construct
  misc_feature 1..80: note = Synthetic: >KJ473814_1-cand-120-199
  source 1..80: mol_type = other DNA
aatgttattcgtggctggatctttggttcaacttttgacaaccgctcgcagtctgctattatagtgaacaattctacaca

SEQ ID NO: 18962 - DNA, 80 bp, synthetic construct
  misc_feature 1..80: note = Synthetic: >KJ473814_1-cand-220-299
  source 1..80: mol_type = other DNA
attttgttttatgcactgaacccatgtttacggtgtcgcgtaaccaacactataaatcttgggtctatcagcatgctaga

SEQ ID NO: 18963 - DNA, 80 bp, synthetic construct
  misc_feature 1..80: note = Synthetic: >KJ473814_1-cand-320-399
  source 1..80: mol_type = other DNA
atatcctagctttcaattagatgtctccttaaagaataatgtcaattttcgacatcttcgtgagttcatttttaagaatg

SEQ ID NO: 18964 - DNA, 80 bp, synthetic construct
  misc_feature 1..80: note = Synthetic: >KJ473814_1-cand-420-499
  source 1..80: mol_type = other DNA
tattcttcatatgaacctatcaatgttgttagtggcatacctagtggtttttcagtgttaaagccaattatgagcctccc

SEQ ID NO: 18965 - DNA, 80 bp, synthetic construct
  misc_feature 1..80: note = Synthetic: >KJ473815_1-cand-40-119
  source 1..80: mol_type = other DNA
caggagtgtttgacattgttaaaggtcaaatacaagtagcttcagataaccttaaggaatgtgtaaaaaccttccttgat

SEQ ID NO: 18966 - DNA, 80 bp, synthetic construct
  misc_feature 1..80: note = Synthetic: >KJ473815_2-cand-150-229
  source 1..80: mol_type = other DNA
tagaggcttgcctcaaggtttttcagttttgagaccaattctcaaactgccctttggaattaacattacttcttatagag

SEQ ID NO: 18967 - DNA, 80 bp, synthetic construct
  misc_feature 1..80: note = Synthetic: >KJ473815_2-cand-270-349
  source 1..80: mol_type = other DNA
accagaaagtgctgcttattatgttggtaaccttaagtattctaccttcatgcttagttttaatgaaaatgggaccatca

SEQ ID NO: 18968 - DNA, 80 bp, synthetic construct
  misc_feature 1..80: note = Synthetic: >KJ473815_2-cand-380-459
  source 1..80: mol_type = other DNA
ttgctgaattaaaatgcaccataaaaaattttaatgttaataaaggaatctaccaaacatctaattttagagtttcaccc

SEQ ID NO: 18969 - DNA, 80 bp, synthetic construct
  misc_feature 1..80: note = Synthetic: >KJ473821_1-cand-40-119
  source 1..80: mol_type = other DNA
taatggatttgagaagagctatcaaacccatcgcgaccctgtgtctaagcttgccgtcacaggtgtcgtcacacctatga

SEQ ID NO: 18970 - DNA, 80 bp, synthetic construct
  misc_feature 1..80: note = Synthetic: >KJ473821_2-cand-40-119
  source 1..80: mol_type = other DNA
gataaccattcttacatctaccattccgcctatgcagattgcactagttgtggtaagggtagttggctcacaggtaatgc

SEQ ID NO: 18971 - DNA, 80 bp, synthetic construct
  misc_feature 1..80: note = Synthetic: >KJ473821_3-cand-0-79
  source 1..80: mol_type = other DNA
gtaagggtgttgattacactaaaaagcaagttacagtgggcggagtccattactattgttatagttcaaaggactttctg

SEQ ID NO: 18972 - DNA, 80 bp, synthetic construct
  misc_feature 1..80: note = Synthetic: >KJ473821_3-cand-140-219
  source 1..80: mol_type = other DNA
atatctcatggcttagatcttatgcaggctagagcttttgttaaaatggtacgtgtaccatatgtctgcctgcttactaa

SEQ ID NO: 18973 - DNA, 80 bp, synthetic construct
  misc_feature 1..80: note = Synthetic: >KJ473821_4-cand-0-79
  source 1..80: mol_type = other DNA
agcaggatgcagcacaacaggttgcctggcaattgcatcgccacggcaaactgtcaggcttcagccttcgatggcgttgt

SEQ ID NO: 18974 - DNA, 80 bp, synthetic construct
  misc_feature 1..80: note = Synthetic: >KJ473821_4-cand-100-179
  source 1..80: mol_type = other DNA
acaatactgattcgaaactacgttatgctaaacgtagattctctcctcttaaaccatcagatgtaatggacatcgacccg

SEQ ID NO: 18975 - DNA, 80 bp, synthetic construct
  misc_feature 1..80: note = Synthetic: >KJ473821_5-cand-0-79
  source 1..80: mol_type = other DNA
cttattctaacatatcacttgcataccagggtctttttcccaagcagggagaccttgggcagcagtatgtctattctgtg

SEQ ID NO: 18976 - DNA, 80 bp, synthetic construct
  misc_feature 1..80: note = Synthetic: >KJ473821_5-cand-100-179
  source 1..80: mol_type = other DNA
taataaaggtgtccaaggcctgggcaaactttttgtttccgactatgccactaaagctgaaacatttggtgatggctttg

SEQ ID NO: 18977 - DNA, 80 bp, synthetic construct
  misc_feature 1..80: note = Synthetic: >KJ473821_5-cand-320-399
  source 1..80: mol_type = other DNA
ttgaatcatactttagtgattttgcccgatggttgtggtaccaacctatgggtcttctattgtgtgcttgagccgcgcaa

SEQ ID NO: 18978 - DNA, 80 bp, synthetic construct
  misc_feature 1..80: note = Synthetic: >KJ473821_6-cand-130-209
  source 1..80: mol_type = other DNA
aagcctgggctagtcttgttgatgaggcatttcctatggatgacgatgaggagtccattgtagatgagcctaagcctatt

SEQ ID NO: 18979 - DNA, 80 bp, synthetic construct
  misc_feature 1..80: note = Synthetic: >KJ473821_6-cand-230-309
  source 1..80: mol_type = other DNA
gcaacaaattactgtacaggtgtttgaggctaaagcctttgaaacaccggcagtcaatttttgtaatgctgttagtgtag

SEQ ID NO: 18980 - DNA, 80 bp, synthetic construct
  misc_feature 1..80: note = Synthetic: >KJ473821_6-cand-330-409
  source 1..80: mol_type = other DNA
gatgttatagttcgggatgtaaaaattgcacctgagccaccaaagctggaacaaccgcaagtgtcagctgtgcaggttga

SEQ ID NO: 18981 - DNA, 80 bp, synthetic construct
  misc_feature 1..80: note = Synthetic: >KJ473821_6-cand-430-509
  source 1..80: mol_type = other DNA
ttcaggctaagtctgaacctggacaggccgctctacctgagcctgttatggttgaggatggtgttacagcagttactaag

SEQ ID NO: 18982 - DNA, 80 bp, synthetic construct
  misc_feature 1..80: note = Synthetic: >KJ473821_6-cand-520-599
  source 1..80: mol_type = other DNA
cgcaagagcttgccatgcggtctcagggtgatgcatcaacgcaggttcaggctcagcctcaatctgttgctgctgcacaa

SEQ ID NO: 18983 - DNA, 80 bp, synthetic construct
  misc_feature 1..80: note = Synthetic: >KJ473821_6-cand-620-699
  source 1..80: mol_type = other DNA
cgtgactccagcagctactgctaaaccggaaattccggcttctagcaactatgaagctgacgtggaggttgaacaaccag

SEQ ID NO: 18984 - DNA, 80 bp, synthetic construct
  misc_feature 1..80: note = Synthetic: >KM213963_1-cand-40-119
  source 1..80: mol_type = other DNA
gctcctggagaggttgacgagttcgtcctcatcccaagtgtttctagtggtgaagaagtggtttctgttgtgagtgaaaa

SEQ ID NO: 18985 - DNA, 80 bp, synthetic construct
  misc_feature 1..80: note = Synthetic: >KM213963_2-cand-0-79
  source 1..80: mol_type = other DNA
ggcttcttttgtttataaggagtctaactttatgtatggttcatatcatccatcttgttcatttagacctgagaacatta

SEQ ID NO: 18986 - DNA, 80 bp, synthetic construct
  misc_feature 1..80: note = Synthetic: >KM213963_2-cand-130-209
  source 1..80: mol_type = other DNA
atacaaggtggctgtaaacaatctgtatttcatggtaaagcatcatgttgttatgcttattcatacggcggcagtcgcac

SEQ ID NO: 18987 - DNA, 80 bp, synthetic construct
  misc_feature 1..80: note = Synthetic: >KM347965_1-cand-40-119
  source 1..80: mol_type = other DNA
tgaagacgttgttaataatgcacataagtatgatgtacttatgactgacattagttataacaacatctggttgacatatg

SEQ ID NO: 18988 - DNA, 80 bp, synthetic construct
  misc_feature 1..80: note = Synthetic: >KM347965_10-cand-120-199
  source 1..80: mol_type = other DNA
ctctacaagccaaaggggataacatggtgtgtacccatggtaagagcgttacaacacgtgtcactaaggtccaaggttct

SEQ ID NO: 18989 - DNA, 80 bp, synthetic construct
  misc_feature 1..80: note = Synthetic: >KM347965_10-cand-320-399
  source 1..80: mol_type = other DNA
tatgacgctgataaaacatacacatttaaagtggacgacttaagcgtaacatctgttctcatgttaactggttacaagct

SEQ ID NO: 18990 - DNA, 80 bp, synthetic construct
  misc_feature 1..80: note = Synthetic: >KM347965_10-cand-420-499
  source 1..80: mol_type = other DNA
gcgtacctaaaagtgcatcaaacgtaagcaaacctgataccatgcaaaagctagatgagtatgcaaacatgttcttttct

SEQ ID NO: 18991 - DNA, 80 bp, synthetic construct
  misc_feature 1..80: note = Synthetic: >KM347965_10-cand-520-599
  source 1..80: mol_type = other DNA
attctgtgttacaatttttaagtaccttttgtgtttttattttttctttttagaacgctgtacaaagtctaagaggctta

SEQ ID NO: 18992 - DNA, 80 bp, synthetic construct
  misc_feature 1..80: note = Synthetic: >KM347965_10-cand-610-689
  source 1..80: mol_type = other DNA
taaaccaccttttgctttaaagccattggacgtaaaactgcgagctcttaattctgtaaaattgcttacaaacactaaat

SEQ ID NO: 18993 - DNA, 80 bp, synthetic construct
  misc_feature 1..80: note = Synthetic: >KM347965_11-cand-90-169
  source 1..80: mol_type = other DNA
gtgtgcacaacgtttataatgagtttccatcttggtatcttggtaggtatggtaaaagtttgtcttatgctaaaaactgc

SEQ ID NO: 18994 - DNA, 80 bp, synthetic construct
  misc_feature 1..80: note = Synthetic: >KM347965_11-cand-250-329
  source 1..80: mol_type = other DNA
tggaaggtcgttggtgtttgctatcaatgccgtctttggtaatactgacttatgttatgaccatcaaggtgtagctaagt

SEQ ID NO: 18995 - DNA, 80 bp, synthetic construct
  misc_feature 1..80: note = Synthetic: >KM347965_11-cand-340-419
  source 1..80: mol_type = other DNA
tgtttttgacaattgtgttttcaatgcagcttgcacccagcttgttggtatgggtggtactgcagtgtattgtttcaagg

SEQ ID NO: 18996 - DNA, 80 bp, synthetic construct
  misc_feature 1..80: note = Synthetic: >KM347965_11-cand-430-509
  source 1..80: mol_type = other DNA
gctaggggctcataagacttatgctgaactaatacctgatacccattatatgttacgggatggtaatacgttgaaattac

SEQ ID NO: 18997 - DNA, 80 bp, synthetic construct
  misc_feature 1..80: note = Synthetic: >KM347965_11-cand-520-599
  source 1..80: mol_type = other DNA
tagaggttttggtttacgtattgtacaaactcttgcaactacgtactgtagagttggtgagtgcacacaatctaaacaag

SEQ ID NO: 18998 - DNA, 80 bp, synthetic construct
  misc_feature 1..80: note = Synthetic: >KM347965_11-cand-580-659
  source 1..80: mol_type = other DNA
gtgcacacaatctaaacaagggttttgtgtgggtttagataattggtttgtttatgacaaggcttttggtgaaggttata

SEQ ID NO: 18999 - DNA, 80 bp, synthetic construct
  misc_feature 1..80: note = Synthetic: >KM347965_11-cand-670-749
  source 1..80: mol_type = other DNA
cagtgtttttggttttgtaactaatgtgtttaagttattcaaccaaaacttgtcggttgttgcaacgtctgggtatatgt

SEQ ID NO: 19000 - DNA, 80 bp, synthetic construct
  misc_feature 1..80: note = Synthetic: >KM347965_11-cand-760-839
  source 1..80: mol_type = other DNA
gcttatagctctgtttgccatagcagtctgttatgcattcttgaagtttaagagagtttttggtgattgtacaatgttcg

SEQ ID NO: 19001 - DNA, 80 bp, synthetic construct
  misc_feature 1..80: note = Synthetic: >KM347965_11-cand-850-929
  source 1..80: mol_type = other DNA
cattgttacactctttattaacaatttatcatattttttcacacataatttggtgttagtggttgtttatgctgtagcgt

SEQ ID NO: 19002 - DNA, 80 bp, synthetic construct
  misc_feature 1..80: note = Synthetic: >KM347965_12-cand-0-79
  source 1..80: mol_type = other DNA
atagtagtcggttgccgacgggtgcctcagttgtgttaggagactactttcccacgttaggaccttggtatgattgcgtc

SEQ ID NO: 19003 - DNA, 80 bp, synthetic construct
  misc_feature 1..80: note = Synthetic: >KM347965_12-cand-90-169
  source 1..80: mol_type = other DNA
cctacggaggtgtggtgttggaagacctgagggctctttacttagatcaccaacagggtgtggcgcgtgatttagctttt

SEQ ID NO: 19004 - DNA, 80 bp, synthetic construct
  misc_feature 1..80: note = Synthetic: >KM347965_12-cand-180-259
  source 1..80: mol_type = other DNA
gttatccgtacacagcaattgttgtacttaacaaggagctgtttaatggacaaggttatggcggtttgctttgcttctgc

SEQ ID NO: 19005 - DNA, 80 bp, synthetic construct
  misc_feature 1..80: note = Synthetic: >KM347965_12-cand-270-349
  source 1..80: mol_type = other DNA
gcaccataccggcctttaatgctaattgttctacttcatgtacagtacgttcattcaggctatgtgcagatgagagtatt

SEQ ID NO: 19006 - DNA, 80 bp, synthetic construct
  misc_feature 1..80: note = Synthetic: >KM347965_12-cand-360-439
  source 1..80: mol_type = other DNA
gtattttaggtctgaagtggtcaagctccgaagtcgtggcttacttagcaggtgaagtttatagttacaagcttagtaat

SEQ ID NO: 19007 - DNA, 80 bp, synthetic construct
  misc_feature 1..80: note = Synthetic: >KM347965_12-cand-450-529
  source 1..80: mol_type = other DNA
acaatgtcactattaagacccaaaccaatgccaatcaaatatattggtggtttaaccctgttcgtgatttgtcatactac

SEQ ID NO: 19008 - DNA, 80 bp, synthetic construct
  misc_feature 1..80: note = Synthetic: >KM347965_12-cand-660-739
  source 1..80: mol_type = other DNA
ggtttgttttaacaaactcgtcaactattgttagtggtaagtttgtgtctagccaaccgttgcttgtaaactgcttaaca

SEQ ID NO: 19009 - DNA, 80 bp, synthetic construct
  misc_feature 1..80: note = Synthetic: >KM347965_12-cand-750-829
  source 1..80: mol_type = other DNA
gttttggtgacgaaacctccattatcaactttgacaccgttcctagtcagtgtaacggtgctactgttaatggtagtttt

SEQ ID NO: 19010 - DNA, 80 bp, synthetic construct
  misc_feature 1..80: note = Synthetic: >KM347965_12-cand-840-919
  source 1..80: mol_type = other DNA
gatttaacctcaattttacagcgaacgttgcatcttcaagtggtactagttttcttgctttgaacactactggtggtgtt

SEQ ID NO: 19011 - DNA, 80 bp, synthetic construct
  misc_feature 1..80: note = Synthetic: >KM347965_12-cand-930-1009
  source 1..80: mol_type = other DNA
tttcttgctttaatgagacaaaaaccactaacttatacatgtcagaaggtgctttaccatttggtacacacgaaggtgct

SEQ ID NO: 19012 - DNA, 80 bp, synthetic construct
  misc_feature 1..80: note = Synthetic: >KM347965_12-cand-1020-1099
  source 1..80: mol_type = other DNA
acgttagttataacgaaaccagttttaaatatattggtgtgttacctccttctgttaaagagatcgctgttagcaaatgg

SEQ ID NO: 19013 - DNA, 80 bp, synthetic construct
  misc_feature 1..80: note = Synthetic: >KM347965_13-cand-0-79
  source 1..80: mol_type = other DNA
ccatggttgttaagaagtgtggtgaattgttttctacagcatggcagtctatttgtgaggtttctgagcagtggtggtca

SEQ ID NO: 19014 - DNA, 80 bp, synthetic construct
  misc_feature 1..80: note = Synthetic: >KM347965_13-cand-80-159
  source 1..80: mol_type = other DNA
ctcctacgtcgttgttagagacaccatcaaaatgctttgtagtgcagcatttaccattcagggactaaaacctgtttttg

SEQ ID NO: 19015 - DNA, 80 bp, synthetic construct
  misc_feature 1..80: note = Synthetic: >KM347965_13-cand-170-249
  source 1..80: mol_type = other DNA
tgcggcttcaagtcttgttaaaagctgcattagtattctagagtctgtttttgatatgtttacacagactgtagaattct

SEQ ID NO: 19016 - DNA, 80 bp, synthetic construct
  misc_feature 1..80: note = Synthetic: >KM347965_13-cand-260-339
  source 1..80: mol_type = other DNA
agccaagtttcttttgcttggttgtaaatacatattgtttgaaaatgcactctttaaattagaaacgcttaagctgtcag

SEQ ID NO: 19017 - DNA, 80 bp, synthetic construct
  misc_feature 1..80: note = Synthetic: >KM347965_13-cand-340-419
  source 1..80: mol_type = other DNA
gcaagcgtgaatctggtttgaaggatgctgtttttgcatctgccattgttggtagtacgatagaggtcaagccctctaga

SEQ ID NO: 19018 - DNA, 80 bp, synthetic construct
  misc_feature 1..80: note = Synthetic: >KM347965_13-cand-420-499
  source 1..80: mol_type = other DNA
tttgagaaatctacagccaatttagttgttgtagaagatgttgttatgcctggcgagggccatgcagttgttgttggaga

SEQ ID NO: 19019 - DNA, 80 bp, synthetic construct
  misc_feature 1..80: note = Synthetic: >KM347965_13-cand-500-579
  source 1..80: mol_type = other DNA
catggctttttatagaagtggtgattattattttatgatgacttcacctacaagtgttttgactactactgtattcaaag

SEQ ID NO: 19020 - DNA, 80 bp, synthetic construct
  misc_feature 1..80: note = Synthetic: >KM347965_13-cand-580-659
  source 1..80: mol_type = other DNA
ctgaaaaagccaatgtctacaaagttgattacaatgtaccggatgcgtacaaaggaaaacttgttagtgccatcggtaca

SEQ ID NO: 19021 - DNA, 80 bp, synthetic construct
  misc_feature 1..80: note = Synthetic: >KM347965_13-cand-660-739
  source 1..80: mol_type = other DNA
tcttacagtgttgatggttccattgatgatgccgtatctaagttaaacactgcgttgcaagtttattatgacaacgcatt

SEQ ID NO: 19022 - DNA, 80 bp, synthetic construct
  misc_feature 1..80: note = Synthetic: >KM347965_13-cand-740-819
  source 1..80: mol_type = other DNA
gtgttttagagctttttcattaaaagaaaccatcgttgttgaacctttccagcacaagtataaaatgcccaagtgtctca

SEQ ID NO: 19023 - DNA, 80 bp, synthetic construct
  misc_feature 1..80: note = Synthetic: >KM347965_13-cand-820-899
  source 1..80: mol_type = other DNA
aaaatcacacaggtctctgggaaattattttgagtggttctaaagatttaggcttttttgataagtacaaagctttagaa

SEQ ID NO: 19024 - DNA, 80 bp, synthetic construct
  misc_feature 1..80: note = Synthetic: >KM347965_13-cand-900-979
  source 1..80: mol_type = other DNA
tcgttggctgatatttatgacacaaatgactatgccaatttagtgtgcccaaaacttttgcacaagctcgacaatggtat

SEQ ID NO: 19025 - DNA, 80 bp, synthetic construct
  misc_feature 1..80: note = Synthetic: >KM347965_13-cand-980-1059
  source 1..80: mol_type = other DNA
aatgtggtaccgctgcatgaagggtgttacaggacctattgtaacacgcgcagcttgcagctttgtcggaggttgtgtta

SEQ ID NO: 19026 - DNA, 80 bp, synthetic construct
  misc_feature 1..80: note = Synthetic: >KM347965_13-cand-1060-1139
  source 1..80: mol_type = other DNA
aagtgtgtctagaaggttttgattccgttgctgctagggttgaagtctgctaccaaaagctttgtggtattaagactttt

SEQ ID NO: 19027 - DNA, 80 bp, synthetic construct
  misc_feature 1..80: note = Synthetic: >KM347965_13-cand-1140-1219
  source 1..80: mol_type = other DNA
gatttaaacgtggctggtattgtatttgccggttttaaaacaccaagtggcaaaacctttctagattttggtgatgacgc

SEQ ID NO: 19028 - DNA, 80 bp, synthetic construct
  misc_feature 1..80: note = Synthetic: >KM347965_13-cand-1220-1299
  source 1..80: mol_type = other DNA
cattgagctttttgatgatgaacctgtacgttgttttacaggtgccacagtgcctgtgaacgtttctgattttgaagatg

SEQ ID NO: 19029 - DNA, 80 bp, synthetic construct
  misc_feature 1..80: note = Synthetic: >KM347965_13-cand-1300-1379
  source 1..80: mol_type = other DNA
acgttcggggtgatgttgttttagaggaatgtgaataccaacccccaagagatgaaggtatagttgttaacttaggaggc

SEQ ID NO: 19030 - DNA, 80 bp, synthetic construct
  misc_feature 1..80: note = Synthetic: >KM347965_13-cand-1380-1459
  source 1..80: mol_type = other DNA
tacacattttacactacagataatgagaagttctacccctttggtgattgtaaagttgtgccaaagttgtacaataaagc

SEQ ID NO: 19031 - DNA, 80 bp, synthetic construct
  misc_feature 1..80: note = Synthetic: >KM347965_13-cand-1460-1539
  source 1..80: mol_type = other DNA
tggtggtggtaaaaacgtaacctttagtgatgatgtggaagtcagagaagttgatcctgttttcaaagttaaagtcactt

SEQ ID NO: 19032 - DNA, 80 bp, synthetic construct
  misc_feature 1..80: note = Synthetic: >KM347965_13-cand-1540-1619
  source 1..80: mol_type = other DNA
ttgagtttgatgatgacactattacgggcgttttaaacacagttattggtaacactatgacttttgaaggtgatagctgg

SEQ ID NO: 19033 - DNA, 80 bp, synthetic construct
  misc_feature 1..80: note = Synthetic: >KM347965_13-cand-1620-1699
  source 1..80: mol_type = other DNA
gaaacccttgaaaacttgttaaccacacaggttgatgcagtgtttaaacagttagcacaagcaggtttaacattacctga

SEQ ID NO: 19034 - DNA, 80 bp, synthetic construct
  misc_feature 1..80: note = Synthetic: >KM347965_13-cand-1700-1779
  source 1..80: mol_type = other DNA
ttattacatttatgatagctgtggtggttttgatgtgcattgtcctgaaggcatcatggtttcacagtatgacctgtcgg

SEQ ID NO: 19035 - DNA, 80 bp, synthetic construct
  misc_feature 1..80: note = Synthetic: >KM347965_13-cand-1780-1859
  source 1..80: mol_type = other DNA
ttgatagtaatatagagtgtgttgaggatgcctgcaacttggaatatgtggaagaggtttctgactattgcccgtcagat

SEQ ID NO: 19036 - DNA, 80 bp, synthetic construct
  misc_feature 1..80: note = Synthetic: >KM347965_13-cand-1860-1939
  source 1..80: mol_type = other DNA
gatgatgttgatgaagacgggtgtgttcaaacggtttcagtgtttgcttttgacaacagtacgattaatggtaaagttgt

SEQ ID NO: 19037 - DNA, 80 bp, synthetic construct
  misc_feature 1..80: note = Synthetic: >KM347965_13-cand-1950-2029
  source 1..80: mol_type = other DNA
tcacaaaataactgctggattaatgcagctggttaccaattacagtgtcttaacgttctcagtagtgaagagttcagaca

SEQ ID NO: 19038 - DNA, 80 bp, synthetic construct
  misc_feature 1..80: note = Synthetic: >KM347965_13-cand-2030-2109
  source 1..80: mol_type = other DNA
gtactgtgttggtgatgttgaaagtttagtacgccttatgtatgacatgactaacagaaaggttggtgacttaggtgagg

SEQ ID NO: 19039 - DNA, 80 bp, synthetic construct
  misc_feature 1..80: note = Synthetic: >KM347965_13-cand-2110-2189
  source 1..80: mol_type = other DNA
ctgaatatgtgttagagctttgtctaggaggcctggagactgctaaagtgacattgtctgcgcaatgtgattgtggcatt

SEQ ID NO: 19040 - DNA, 80 bp, synthetic construct
  misc_feature 1..80: note = Synthetic: >KM347965_13-cand-2200-2279
  source 1..80: mol_type = other DNA
tcattgcgggttgtgcttttagaatgtgttgtacagatgcaacctttgactatggaatgtgtggtacatgtcgtgttatt

SEQ ID NO: 19041 - DNA, 80 bp, synthetic construct
  misc_feature 1..80: note = Synthetic: >KM347965_13-cand-2280-2359
  source 1..80: mol_type = other DNA
aagaagactaccattgtgaaagttgaaggtactggcgtctttttacacgaacctaaaacctacaaacctcttgttaaacc

SEQ ID NO: 19042 - DNA, 80 bp, synthetic construct
  misc_feature 1..80: note = Synthetic: >KM347965_13-cand-2360-2439
  source 1..80: mol_type = other DNA
agtttgcaaagcaattttcaaaggtgacactgatggcggccactacatggttcatgatgtagaagccaaagtgttggttg

SEQ ID NO: 19043 - DNA, 80 bp, synthetic construct
  misc_feature 1..80: note = Synthetic: >KM347965_13-cand-2440-2519
  source 1..80: mol_type = other DNA
acggttttggtttgcatccagtgaagaacctaccctttacctctgtttgttttgttaatgctaattatgtgagacgtgct

SEQ ID NO: 19044 - DNA, 80 bp, synthetic construct
  misc_feature 1..80: note = Synthetic: >KM347965_13-cand-2530-2609
  source 1..80: mol_type = other DNA
aaagtgcagctaagaattacccgtgggccgctgcagttgatagccaagagattcttagtgtaccaacagaaacacgtaat

SEQ ID NO: 19045 - DNA, 80 bp, synthetic construct
  misc_feature 1..80: note = Synthetic: >KM347965_2-cand-20-99
  source 1..80: mol_type = other DNA
tcttactatggtttagtcaattatagttggttgttgcacattgtgaattttgagactgtagctgctgaaattgttgtgtt

SEQ ID NO: 19046 - DNA, 80 bp, synthetic construct
  misc_feature 1..80: note = Synthetic: >KM347965_3-cand-30-109
  source 1..80: mol_type = other DNA
tgagatgcgtgactacttcggcgatttagatgatattgttattgatggcattatatattcgcatgcgtgggacgtcgaac

SEQ ID NO: 19047 - DNA, 80 bp, synthetic construct
  misc_feature 1..80: note = Synthetic: >KM347965_4-cand-0-79
  source 1..80: mol_type = other DNA
aactgtgacagcatggtctggtgtttgtgcaatatctaacaataaaactatgggttttattgttaaagatgtgtcattga

SEQ ID NO: 19048 - DNA, 80 bp, synthetic construct
  misc_feature 1..80: note = Synthetic: >KM347965_5-cand-140-219
  source 1..80: mol_type = other DNA
atggtattggcgcttcaatgattagcatagatagtgggaattgccctttttcaccggataaattgaatcaacatttggct

SEQ ID NO: 19049 - DNA, 80 bp, synthetic construct
  misc_feature 1..80: note = Synthetic: >KM347965_5-cand-250-329
  source 1..80: mol_type = other DNA
actggtagtgattgcgccttttcattgactgtacaaaataggtatttcacacgagtctttgcacatttatttgtgactta

SEQ ID NO: 19050 - DNA, 80 bp, synthetic construct
  misc_feature 1..80: note = Synthetic: >KM347965_6-cand-150-229
  source 1..80: mol_type = other DNA
tcaataagtgtctctgtattcgtatacacagaagaggagcagcgtaaagttttacagtactttgagacacctgtcacagt

SEQ ID NO: 19051 - DNA, 80 bp, synthetic construct
  misc_feature 1..80: note = Synthetic: >KM347965_7-cand-0-79
  source 1..80: mol_type = other DNA
acaatctatatcatttcttaaacaagatgttacaattatctctacagacattgttaacagttctaaatctgttgttgcta

SEQ ID NO: 19052 - DNA, 80 bp, synthetic construct
  misc_feature 1..80: note = Synthetic: >KM347965_7-cand-50-129
  source 1..80: mol_type = other DNA
ttgttaacagttctaaatctgttgttgctagtgagcaacactttgttgttaatagcaaacattatcgtgctattcctgag

SEQ ID NO: 19053 - DNA, 80 bp, synthetic construct
  misc_feature 1..80: note = Synthetic: >KM347965_9-cand-0-79
  source 1..80: mol_type = other DNA
ttgtcaacaagtctgggaggtaaaactatacttggatatggctcattgagtgatgaattcacaacaacagaggttgtacg

SEQ ID NO: 19054 - DNA, 80 bp, synthetic construct
  misc_feature 1..80: note = Synthetic: >KM347965_9-cand-80-159
  source 1..80: mol_type = other DNA
ccaaatgtttggtgttaatctacagagtaattcagtcaaatcttggttctacccaattgctatcacagttgtttgtatgt

SEQ ID NO: 19055 - DNA, 80 bp, synthetic construct
  misc_feature 1..80: note = Synthetic: >KM347965_9-cand-180-259
  source 1..80: mol_type = other DNA
tttttgtatacacctttcagttggtttggtcctgccagtatagggtgcctcttactcatgactgttgtagtatctgcatt

SEQ ID NO: 19056 - DNA, 80 bp, synthetic construct
  misc_feature 1..80: note = Synthetic: >KM347965_9-cand-390-469
  source 1..80: mol_type = other DNA
gaggttaatatgtcattgatagctgtagacatgcagagtgtggcacttatggtgttgtgtttgcttgtagcaattgttca

SEQ ID NO: 19057 - DNA, 80 bp, synthetic construct
  misc_feature 1..80: note = Synthetic: >KM347965_9-cand-450-529
  source 1..80: mol_type = other DNA
ttgcttgtagcaattgttcattgctacagattttgtacacagaggcaatccataccggtgtttgttgttacactctgttt

SEQ ID NO: 19058 - DNA, 80 bp, synthetic construct
  misc_feature 1..80: note = Synthetic: >KM454473_1-cand-0-79
  source 1..80: mol_type = other DNA
ccgtactctttatcagcccaaattgctttcttattcagacgtcgttaatttaacgtcgtgtgaagctaattattataatg

SEQ ID NO: 19059 - DNA, 80 bp, synthetic construct
  misc_feature 1..80: note = Synthetic: >KM454473_1-cand-120-199
  source 1..80: mol_type = other DNA
ttttgatgatgagttcgataatatatataccgaactcaacacttctaaagacctcatagactcaatctataaggatttta

SEQ ID NO: 19060 - DNA, 80 bp, synthetic construct
  misc_feature 1..80: note = Synthetic: >KM454473_2-cand-0-79
  source 1..80: mol_type = other DNA
gtaccttggtggttggcctgtgtttatatagcttttattgcttatatgtacactccatttgccatgtggtgttatggcac

SEQ ID NO: 19061 - DNA, 80 bp, synthetic construct
  misc_feature 1..80: note = Synthetic: >KM454473_2-cand-120-199
  source 1..80: mol_type = other DNA
gtaggcagttatgatttggcagcccagagtacgtttgttatacgtaatgttgagtttgtcaaactttctaatgaagtcgg

SEQ ID NO: 19062 - DNA, 80 bp, synthetic construct
  misc_feature 1..80: note = Synthetic: >KM454473_3-cand-170-249
  source 1..80: mol_type = other DNA
atggcttgctaagtgcacaccctcggaagtgccgcagcacatttacgtttgcacacctgatagacgtaatgtctacaaaa

SEQ ID NO: 19063 - DNA, 80 bp, synthetic construct
  misc_feature 1..80: note = Synthetic: >KM454473_4-cand-0-79
  source 1..80: mol_type = other DNA
ctgcaaaagaactcttgctcctggaaagactgtagaccaggtttttggtacacgccagaagggccgtgagcgcaacttcg

SEQ ID NO: 19064 - DNA, 80 bp, synthetic construct
  misc_feature 1..80: note = Synthetic: >KM454473_4-cand-150-229
  source 1..80: mol_type = other DNA
ttctcatgcaatgctctttggcagtaatgtccaggcaaaattgcagccagatgggctccacgtcactttcagttttacaa

SEQ ID NO: 19065 - DNA, 80 bp, synthetic construct
  misc_feature 1..80: note = Synthetic: >KM454473_4-cand-220-299
  source 1..80: mol_type = other DNA
agttttacaactgtagtgccgcgtgatgacccacagtttgacaattatagacaaatttgtgatgagtgtgttgacggtgt

SEQ ID NO: 19066 - DNA, 80 bp, synthetic construct
  misc_feature 1..80: note = Synthetic: >KM454473_5-cand-0-79
  source 1..80: mol_type = other DNA
tagacatttatcattatccatctggtgatgatatgtatgtcattaatgatgcttttgatggtgccgttaaggcaattcct

SEQ ID NO: 19067 - DNA, 80 bp, synthetic construct
  misc_feature 1..80: note = Synthetic: >KM454473_5-cand-110-189
  source 1..80: mol_type = other DNA
gctgctgctgttgacagtcaagagcgcgctctactcgtagaaactcctgttgagactcctaaggaagaaactcagaagcc

SEQ ID NO: 19068 - DNA, 80 bp, synthetic construct
  misc_feature 1..80: note = Synthetic: >KM454473_6-cand-0-79
  source 1..80: mol_type = other DNA
cgcaactgtgtctttcactttggcaaagggtgcatctatagcagatgttcttaaactttttgttaaagaagctgccgatg

SEQ ID NO: 19069 - DNA, 80 bp, synthetic construct
  misc_feature 1..80: note = Synthetic: >KM454473_6-cand-100-179
  source 1..80: mol_type = other DNA
aagtctcatgaattttggactagagctcacaataaatgtcgtaaccttaaagaccttgtggcgacacactgttgtaaggc

SEQ ID NO: 19070 - DNA, 80 bp, synthetic construct
  misc_feature 1..80: note = Synthetic: >KM454473_6-cand-300-379
  source 1..80: mol_type = other DNA
ttggaatgggttttgtgaccaactaatccatgccaaactctttgtgaatgaattgggctgtgttttggttggtgttaaaa

SEQ ID NO: 19071 - DNA, 80 bp, synthetic construct
  misc_feature 1..80: note = Synthetic: >KM454473_6-cand-400-479
  source 1..80: mol_type = other DNA
cttgtagcagtccatgctttttataaaaccttggaaaagtgtgccataggtagaatttgggccggtgatctacttttttg

SEQ ID NO: 19072 - DNA, 80 bp, synthetic construct
  misc_feature 1..80: note = Synthetic: >KM454473_6-cand-500-579
  source 1..80: mol_type = other DNA
tggaggaagacaatggtgaagtttggtttgacgctgtatacactgtacaagttgacgaacaaggcactgtcattgaagac

SEQ ID NO: 19073 - DNA, 80 bp, synthetic construct
  misc_feature 1..80: note = Synthetic: >KM454473_6-cand-600-679
  source 1..80: mol_type = other DNA
ttgtcatgatgtgtctatacctgagcgtcaaaagggatatatagtgcaggtttctgctgatggtaaaaattatatgtttt

SEQ ID NO: 19074 - DNA, 80 bp, synthetic construct
  misc_feature 1..80: note = Synthetic: >KM454473_7-cand-0-79
  source 1..80: mol_type = other DNA
tagtgtctggtgttataaaatcaggagctaaattttatgtaacacgttctgatgttaaacaagtcattacttgtctaaca

SEQ ID NO: 19075 - DNA, 80 bp, synthetic construct
  misc_feature 1..80: note = Synthetic: >KM454473_7-cand-90-169
  source 1..80: mol_type = other DNA
tgttagataagaaggccggtggtgttcttaaggatactatgtcttggttttggtttatagttaaatttgttgttgtgtgt

SEQ ID NO: 19076 - DNA, 80 bp, synthetic construct
  misc_feature 1..80: note = Synthetic: >KM454473_7-cand-180-259
  source 1..80: mol_type = other DNA
ttacagcaggttgtttgtatgtttatcatacagattattatggtgttaagatgcacccgatgtatgatgtgaattcaacc

SEQ ID NO: 19077 - DNA, 80 bp, synthetic construct
  misc_feature 1..80: note = Synthetic: >KM454473_7-cand-270-349
  source 1..80: mol_type = other DNA
agaattttaaggttatagaaaatggtgtccttagagacctggtttcagaggacaattgtttttcaaataagtttttgggt

SEQ ID NO: 19078 - DNA, 80 bp, synthetic construct
  misc_feature 1..80: note = Synthetic: >KM454473_7-cand-360-439
  source 1..80: mol_type = other DNA
tttggggcaaaccttatactaatagtagggattgtccaatagttactgctcttatagatggtaccggttttgttgcggca

SEQ ID NO: 19079 - DNA, 80 bp, synthetic construct
  misc_feature 1..80: note = Synthetic: >KM454473_7-cand-450-529
  source 1..80: mol_type = other DNA
gttatgttcattgggttatggacaataccatgtttatacacactgcacaagcagaacaaaaaccttggtatgcacctagt

SEQ ID NO: 19080 - DNA, 80 bp, synthetic construct
  misc_feature 1..80: note = Synthetic: >KM454473_7-cand-650-729
  source 1..80: mol_type = other DNA
cctcaattgtattgttatggtggtgaaaatgatgctccaggtgctatgccatatgagagtgttcaacctcatcgtgatat

SEQ ID NO: 19081 - DNA, 80 bp, synthetic construct
  misc_feature 1..80: note = Synthetic: >KM454473_7-cand-740-819
  source 1..80: mol_type = other DNA
aataatgttaggttttctattcctcaacaaattatgtacacaccctatatagttaagttggcttctgacaactattgtag

SEQ ID NO: 19082 - DNA, 80 bp, synthetic construct
  misc_feature 1..80: note = Synthetic: >KM454473_7-cand-830-909
  source 1..80: mol_type = other DNA
tgtgaaaagacaaagcttggttattgttattcatggaaccctcgttgggttctttataacgatgactatgttaagttgcc

SEQ ID NO: 19083 - DNA, 80 bp, synthetic construct
  misc_feature 1..80: note = Synthetic: >KM454473_8-cand-0-79
  source 1..80: mol_type = other DNA
cgtccatctgacggtgtctatagtgttaacggtttttataaacccgtttatacatgttgtataaggcatacctatccgaa

SEQ ID NO: 19084 - DNA, 80 bp, synthetic construct
  misc_feature 1..80: note = Synthetic: >KM454473_8-cand-80-159
  source 1..80: mol_type = other DNA
aaatacgacgcagtgtgcgaataaaaaagtttctgttttgtattatattaacgacacaacagaggctttttccattacca

SEQ ID NO: 19085 - DNA, 80 bp, synthetic construct
  misc_feature 1..80: note = Synthetic: >KM454473_8-cand-160-239
  source 1..80: mol_type = other DNA
tacccagagccgttgttattaaaccggacacagaatctttcattttgtcgctgggtgattttttactcacagctaaacag

SEQ ID NO: 19086 - DNA, 80 bp, synthetic construct
  misc_feature 1..80: note = Synthetic: >KM454473_8-cand-240-319
  source 1..80: mol_type = other DNA
ctgttagtttatggcactattcagtctcttatgtttttgcgtaatggtacttggtatattaacggtgttccggctcttcc

SEQ ID NO: 19087 - DNA, 80 bp, synthetic construct
  misc_feature 1..80: note = Synthetic: >KM454473_8-cand-310-389
  source 1..80: mol_type = other DNA
cggctcttcctgtcagttacacctttaataccactttaaatgtcactcatactagctgttatgagagtattggtgcacaa

SEQ ID NO: 19088 - DNA, 80 bp, synthetic construct
  misc_feature 1..80: note = Synthetic: >KM454473_8-cand-400-479
  source 1..80: mol_type = other DNA
ttacttcactaatcctttctaatgggttagttgaattttctgctggcaaccttcttcggtctgttgcttgtgaagacaac

SEQ ID NO: 19089 - DNA, 80 bp, synthetic construct
  misc_feature 1..80: note = Synthetic: >KM454473_8-cand-480-559
  source 1..80: mol_type = other DNA
actattataaactctatgcaatgtagtcaccagcgatttaatttttcgactggtttgcattcttatgacagtgttgttcc

SEQ ID NO: 19090 - DNA, 80 bp, synthetic construct
  misc_feature 1..80: note = Synthetic: >KM454473_8-cand-560-639
  source 1..80: mol_type = other DNA
tgtttctggtaatgtcacctacattccttaccctggtgtcggggacaattcgagtttggagttgtacagtcttaatgttt

SEQ ID NO: 19091 - DNA, 80 bp, synthetic construct
  misc_feature 1..80: note = Synthetic: >KM454473_8-cand-640-719
  source 1..80: mol_type = other DNA
cgcttcgttctaaaggtaactatggcgttcattataactatacttgtgttaatgcttctctgtacacctattttcgtgtt

SEQ ID NO: 19092 - DNA, 80 bp, synthetic construct
  misc_feature 1..80: note = Synthetic: >KM454473_8-cand-720-799
  source 1..80: mol_type = other DNA
tattgtcaggatgaacatgattggaatacagaaaagctatgtactgtgtctgactattatgtgcctggtagacatttgta

SEQ ID NO: 19093 - DNA, 80 bp, synthetic construct
  misc_feature 1..80: note = Synthetic: >KM454473_8-cand-800-879
  source 1..80: mol_type = other DNA
tggcagccaacatcaatatgttggcattgtccctcattatactacctgttcttcgttagggcttagccttagtaatatta

SEQ ID NO: 19094 - DNA, 80 bp, synthetic construct
  misc_feature 1..80: note = Synthetic: >KM454473_8-cand-890-969
  source 1..80: mol_type = other DNA
gggttttgatactttttgtattactaatgctaggtctacttataatatagcagaagtcacccagtttcaatgtctttttg

SEQ ID NO: 19095 - DNA, 80 bp, synthetic construct
  misc_feature 1..80: note = Synthetic: >KM454473_8-cand-980-1059
  source 1..80: mol_type = other DNA
tatggtttttgatgctacaggtggtagtagttggggtcaacctattgaatatttttatgttggcctcgatttttcttttg

SEQ ID NO: 19096 - DNA, 80 bp, synthetic construct
  misc_feature 1..80: note = Synthetic: >KM454473_8-cand-1070-1149
  source 1..80: mol_type = other DNA
gtatggtgtcttgcaaattcctccgcaagttatatatgaagaccagtgtcattcttatgatatttatggtattaaaggca

SEQ ID NO: 19097 - DNA, 80 bp, synthetic construct
  misc_feature 1..80: note = Synthetic: >KM454473_8-cand-1150-1229
  source 1..80: mol_type = other DNA
ctggtcacatctataatgtcactggttatgacaattacaccttatctacaggtggtttggctatatcaggtggtaatggt

SEQ ID NO: 19098 - DNA, 80 bp, synthetic construct
  misc_feature 1..80: note = Synthetic: >KM454473_8-cand-1230-1309
  source 1..80: mol_type = other DNA
ctattggcctttcgtaataatggttctttgtatactgtcaaaccgtgttctacagtatctactcaggctgttattgtagc

SEQ ID NO: 19099 - DNA, 80 bp, synthetic construct
  misc_feature 1..80: note = Synthetic: >KM454473_8-cand-1310-1389
  source 1..80: mol_type = other DNA
taaccagttggcagggttgtatttaccgctctcatgtgacatagtttttaatcttaatcttggtaatgaaactactcctg

SEQ ID NO: 19100 - DNA, 80 bp, synthetic construct
  misc_feature 1..80: note = Synthetic: >KM454473_8-cand-1390-1469
  source 1..80: mol_type = other DNA
ttgatggcggctgtttagtttttaattcaacttttaagaaccgacaatcacagctttatggcagtgagtgttatggtgta

SEQ ID NO: 19101 - DNA, 80 bp, synthetic construct
  misc_feature 1..80: note = Synthetic: >KM454473_8-cand-1470-1549
  source 1..80: mol_type = other DNA
tttgccactattggttcttcgtgtatttatgctaattcttctgtgttaaatcgtacactgccgagggcaggcgtagatac

SEQ ID NO: 19102 - DNA, 80 bp, synthetic construct
  misc_feature 1..80: note = Synthetic: >KP143507_1-cand-0-79
  source 1..80: mol_type = other DNA
aaactattctgggtggttacctaccatactgtgggacaggtgctaactgtggttggtacaattttgtctaccaacaaaat

SEQ ID NO: 19103 - DNA, 80 bp, synthetic construct
  misc_feature 1..80: note = Synthetic: >KP143507_2-cand-210-289
  source 1..80: mol_type = other DNA
tacaatctcttataaagatggtgccaagattacaactatgccaaaagcaaagctgggttttcaagatatctctaacattg

SEQ ID NO: 19104 - DNA, 80 bp, synthetic construct
  misc_feature 1..80: note = Synthetic: >KP143507_2-cand-410-489
  source 1..80: mol_type = other DNA
catttaaaaatagcactacaggtgaaattttcaccgtagtgccatgtggtttaacggctcaagctgcagtgattaatgat

SEQ ID NO: 19105 - DNA, 80 bp, synthetic construct
  misc_feature 1..80: note = Synthetic: >KP143507_3-cand-0-79
  source 1..80: mol_type = other DNA
gtattgcgctggttatgctaagaatgtctttgtgcctattgatggtaaaataccagatggcttctcttttagtaattggt

SEQ ID NO: 19106 - DNA, 80 bp, synthetic construct; identical to SEQ ID NO: 19102
  misc_feature 1..80: note = Synthetic: >KP143508_1-cand-0-79
  source 1..80: mol_type = other DNA

SEQ ID NO: 19107 - DNA, 80 bp, synthetic construct; identical to SEQ ID NO: 19103
  misc_feature 1..80: note = Synthetic: >KP143508_2-cand-210-289
  source 1..80: mol_type = other DNA

SEQ ID NO: 19108 - DNA, 80 bp, synthetic construct; identical to SEQ ID NO: 19104
  misc_feature 1..80: note = Synthetic: >KP143508_2-cand-410-489
  source 1..80: mol_type = other DNA

SEQ ID NO: 19109 - DNA, 80 bp, synthetic construct; identical to SEQ ID NO: 19105
  misc_feature 1..80: note = Synthetic: >KP143508_3-cand-0-79
  source 1..80: mol_type = other DNA

SEQ ID NO: 19110 - DNA, 80 bp, synthetic construct; identical to SEQ ID NO: 19102
  misc_feature 1..80: note = Synthetic: >KP143509_1-cand-0-79
  source 1..80: mol_type = other DNA

SEQ ID NO: 19111 - DNA, 80 bp, synthetic construct; identical to SEQ ID NO: 19103
  misc_feature 1..80: note = Synthetic: >KP143509_2-cand-210-289
  source 1..80: mol_type = other DNA

SEQ ID NO: 19112 - DNA, 80 bp, synthetic construct; identical to SEQ ID NO: 19104
  misc_feature 1..80: note = Synthetic: >KP143509_2-cand-410-489
  source 1..80: mol_type = other DNA

SEQ ID NO: 19113 - DNA, 80 bp, synthetic construct; identical to SEQ ID NO: 19105
  misc_feature 1..80: note = Synthetic: >KP143509_3-cand-0-79
  source 1..80: mol_type = other DNA

SEQ ID NO: 19114 - DNA, 80 bp, synthetic construct; identical to SEQ ID NO: 19102
  misc_feature 1..80: note = Synthetic: >KP143510_1-cand-0-79
  source 1..80: mol_type = other DNA

SEQ ID NO: 19115 - DNA, 80 bp, synthetic construct; identical to SEQ ID NO: 19103
  misc_feature 1..80: note = Synthetic: >KP143510_2-cand-210-289
  source 1..80: mol_type = other DNA

SEQ ID NO: 19116 - DNA, 80 bp, synthetic construct; identical to SEQ ID NO: 19104
  misc_feature 1..80: note = Synthetic: >KP143510_2-cand-410-489
  source 1..80: mol_type = other DNA

SEQ ID NO: 19117 - DNA, 80 bp, synthetic construct; identical to SEQ ID NO: 19105
  misc_feature 1..80: note = Synthetic: >KP143510_3-cand-0-79
  source 1..80: mol_type = other DNA

SEQ ID NO: 19118 - DNA, 80 bp, synthetic construct; identical to SEQ ID NO: 19102
  misc_feature 1..80: note = Synthetic: >KP143511_1-cand-0-79
  source 1..80: mol_type = other DNA

SEQ ID NO: 19119 - DNA, 80 bp, synthetic construct; identical to SEQ ID NO: 19103
  misc_feature 1..80: note = Synthetic: >KP143511_2-cand-210-289
  source 1..80: mol_type = other DNA

SEQ ID NO: 19120 - DNA, 80 bp, synthetic construct; identical to SEQ ID NO: 19104
  misc_feature 1..80: note = Synthetic: >KP143511_2-cand-410-489
  source 1..80: mol_type = other DNA

SEQ ID NO: 19121 - DNA, 80 bp, synthetic construct; identical to SEQ ID NO: 19105
  misc_feature 1..80: note = Synthetic: >KP143511_3-cand-0-79
  source 1..80: mol_type = other DNA

SEQ ID NO: 19122 - DNA, 80 bp, synthetic construct; identical to SEQ ID NO: 19102
  misc_feature 1..80: note = Synthetic: >KP143512_1-cand-0-79
  source 1..80: mol_type = other DNA

SEQ ID NO: 19123 - DNA, 80 bp, synthetic construct; identical to SEQ ID NO: 19103
  misc_feature 1..80: note = Synthetic: >KP143512_2-cand-210-289
  source 1..80: mol_type = other DNA

SEQ ID NO: 19124 - DNA, 80 bp, synthetic construct; identical to SEQ ID NO: 19104
  misc_feature 1..80: note = Synthetic: >KP143512_2-cand-410-489
  source 1..80: mol_type = other DNA

SEQ ID NO: 19125 - DNA, 80 bp, synthetic construct; identical to SEQ ID NO: 19105
  misc_feature 1..80: note = Synthetic: >KP143512_3-cand-0-79
  source 1..80: mol_type = other DNA

SEQ ID NO: 19126 - DNA, 80 bp, synthetic construct
  misc_feature 1..80: note = Synthetic: >KP849472_2-cand-0-79
  source 1..80: mol_type = other DNA
cgcaaggtgtgtctacttttccacatactagagttgcatgtattaatgatgatgaaacttacaccattaaagcttatgat

SEQ ID NO: 19127 - DNA, 80 bp, synthetic construct
  misc_feature 1..80: note = Synthetic: >KP849472_2-cand-110-189
  source 1..80: mol_type = other DNA
aagtttcacaaattcttttataggtacttttcacatacaattctatttggacccattaatctaaatgttacaaatagtgt

SEQ ID NO: 19128 - DNA, 80 bp, synthetic construct
  misc_feature 1..80: note = Synthetic: >KP849472_3-cand-0-79
  source 1..80: mol_type = other DNA
caatgggatgaatgtaacactgcatgtcatattaaatgatactagtgcaggaacaaaagttgttggctttgaacgctatg

SEQ ID NO: 19129 - DNA, 80 bp, synthetic construct
  misc_feature 1..80: note = Synthetic: >KP849472_3-cand-100-179
  source 1..80: mol_type = other DNA
attctctttgaaataccacaaaatcaagatggtgaagttaagaatgtcactaatttctgtgtccagacccgccaacttgc

SEQ ID NO: 19130 - DNA, 80 bp, synthetic construct
  misc_feature 1..80: note = Synthetic: >KP849472_3-cand-190-269
  source 1..80: mol_type = other DNA
aagtacactagcttacagggattgtactcaatctctaacacagtgtggttgaagaattatgactgtccattttcaccaca

SEQ ID NO: 19131 - DNA, 80 bp, synthetic construct
  misc_feature 1..80: note = Synthetic: >KP849472_3-cand-410-489
  source 1..80: mol_type = other DNA
cacaaatcacaactatgccaaaaccacagttgggctttagagatgtttcctttaaagttgaaggtgagtgcactgactac

SEQ ID NO: 19132 - DNA, 80 bp, synthetic construct
  misc_feature 1..80: note = Synthetic: >KP849472_3-cand-500-579
  source 1..80: mol_type = other DNA
gatttcagggaactggtattattagaaagacagaatcaaaattggttgcaggacttttctacacatcagcttctggtgat

SEQ ID NO: 19133 - DNA, 80 bp, synthetic construct
  misc_feature 1..80: note = Synthetic: >KP849472_3-cand-590-669
  source 1..80: mol_type = other DNA
ttaaaaatagtacaacaggagaaattttcactgtagtaccttgtgatttaactgctcaagctgctgtaattaatgatgag

SEQ ID NO: 19134 - DNA, 80 bp, synthetic construct
  misc_feature 1..80: note = Synthetic: >KP849472_3-cand-680-759
  source 1..80: mol_type = other DNA
ctatcacgtctattaatcaaacagatctttttgagtttgttaatcacacacatacagtaagaagagtacgtagagcagtc

SEQ ID NO: 19135 - DNA, 80 bp, synthetic construct
  misc_feature 1..80: note = Synthetic: >KP849472_3-cand-770-849
  source 1..80: mol_type = other DNA
ctactataactgcttatagcatgccgcaattttattacataacaaagtggaataatgacacttctgaaaattgtacttct

SEQ ID NO: 19136 - DNA, 80 bp, synthetic construct
  misc_feature 1..80: note = Synthetic: >KP849472_4-cand-0-79
  source 1..80: mol_type = other DNA
gatataccgccaggtacggagaccagttttgggagggttatttaccattactgcggacagtctgtgaattctaatactga

SEQ ID NO: 19137 - DNA, 80 bp, synthetic construct
  misc_feature 1..80: note = Synthetic: >KP849472_4-cand-90-169
  source 1..80: mol_type = other DNA
tacaatttgagatggcagcctggaagtggttttaaagaaaaatttttgtcttctgcaggtcttggtataactaatgtaca

SEQ ID NO: 19138 - DNA, 80 bp, synthetic construct
  misc_feature 1..80: note = Synthetic: >KP849472_4-cand-180-259
  source 1..80: mol_type = other DNA
tttgatgtacgtgagcatgatgaaaataataggtgggaaacttgggatagagttggtttggctgttacaatttatggttc

SEQ ID NO: 19139 - DNA, 80 bp, synthetic construct
  misc_feature 1..80: note = Synthetic: >KP849472_4-cand-270-349
  source 1..80: mol_type = other DNA
gatctatttatgatacttgaagatggttttagcgatgattctttatctatagccgttaaaatatgtcattggacttctgg

SEQ ID NO: 19140 - DNA, 80 bp, synthetic construct
  misc_feature 1..80: note = Synthetic: >KP849472_4-cand-360-439
  source 1..80: mol_type = other DNA
tcattgggtggtaataggtataatttacatataggtgacactagtgattgtgtgttcaatcatcggtttgcactcgatag

SEQ ID NO: 19141 - DNA, 80 bp, synthetic construct
  misc_feature 1..80: note = Synthetic: >KP849472_4-cand-450-529
  source 1..80: mol_type = other DNA
accactgacatttatggatttcaatggactgaaacttatatcaatatttacttaggaggaaccataagtcgtgtttggat

SEQ ID NO: 19142 - DNA, 80 bp, synthetic construct
  misc_feature 1..80: note = Synthetic: >KP849472_4-cand-540-619
  source 1..80: mol_type = other DNA
tgggataaggtggatgttaaaatctcatctaattggaatgctaaaactaactatggctattatgtccaatttgttaataa

SEQ ID NO: 19143 - DNA, 80 bp, synthetic construct
  misc_feature 1..80: note = Synthetic: >KP849472_4-cand-630-709
  source 1..80: mol_type = other DNA
tacacctataataatactggtggtactggtgttaaccaactacaattagggttgtgtgaagacgatttctgtgctggtta

SEQ ID NO: 19144 - DNA, 80 bp, synthetic construct
  misc_feature 1..80: note = Synthetic: >KP849472_4-cand-720-799
  source 1..80: mol_type = other DNA
gtatttacaccagttaatggaaaaataccaggtgacttttcctttaacaactggttcttattatcagataaatctactat

SEQ ID NO: 19145 - DNA, 80 bp, synthetic construct
  misc_feature 1..80: note = Synthetic: >KP849472_4-cand-810-889
  source 1..80: mol_type = other DNA
agagttgtaagcagtcagcctgtttatgttgaatgtttaagacctgtacctagctggtctaacaattctgctatagtaag

SEQ ID NO: 19146 - DNA, 80 bp, synthetic construct
  misc_feature 1..80: note = Synthetic: >KP849472_4-cand-900-979
  source 1..80: mol_type = other DNA
gacacattttgtcctcaagcatctgctgatgttttaagatttaacttgaactttagtggtgaagtttttcatccaaatgc

SEQ ID NO: 19147 - DNA, 80 bp, synthetic construct
  misc_feature 1..80: note = Synthetic: >KP849472_4-cand-1100-1179
  source 1..80: mol_type = other DNA
atttggtggcacagctgatccttatttgtgctttgtaaatttcagtactgctgcacttgacaaccagtttctaggaattc

SEQ ID NO: 19148 - DNA, 80 bp, synthetic construct
  misc_feature 1..80: note = Synthetic: >KP886808_1-cand-90-169
  source 1..80: mol_type = other DNA
tttgacaatcccatattgaaatttggggatggtatttatttcgcagccactgaaaagtctaatgtaataagaggctgggt

SEQ ID NO: 19149 - DNA, 80 bp, synthetic construct
  misc_feature 1..80: note = Synthetic: >KP886808_1-cand-170-249
  source 1..80: mol_type = other DNA
gtttggttccacctttgataacaccactcagtctgctattatagttaataattccacacacattattatacgtgtgtgtt

SEQ ID NO: 19150 - DNA, 80 bp, synthetic construct
  misc_feature 1..80: note = Synthetic: >KP886808_1-cand-250-329
  source 1..80: mol_type = other DNA
attttaatctttgtaaagatcccatgtataccgtgtctgctggcacccaaatatcttcatgggtttatcagaatgctttt

SEQ ID NO: 19151 - DNA, 80 bp, synthetic construct
  misc_feature 1..80: note = Synthetic: >KP886808_1-cand-660-739
  source 1..80: mol_type = other DNA
cagaatggaactattacagatgctgtggattgttctcaaaatccacttgcagagttaaagtgtactacaaagagttttaa

SEQ ID NO: 19152 - DNA, 80 bp, synthetic construct
  misc_feature 1..80: note = Synthetic: >KP886808_1-cand-750-829
  source 1..80: mol_type = other DNA
ggcatttatcaaacttccaatttcagagtagcacctgttactgaggttgttagatttccaaatattacaaacctctgtcc

SEQ ID NO: 19153 - DNA, 80 bp, synthetic construct
  misc_feature 1..80: note = Synthetic: >KP886808_1-cand-830-909
  source 1..80: mol_type = other DNA
ttttgacaaggtttttaatgctacacgctttcctagtgtgtatgcatgggaaagaacaaagatttctgactgtgttgcag

SEQ ID NO: 19154 - DNA, 80 bp, synthetic construct
  misc_feature 1..80: note = Synthetic: >KP886808_1-cand-910-989
  source 1..80: mol_type = other DNA
attacactgttttctacaattcaacttctttttcgactttcaattgttacggagtgtctccttccaaattgatagatttg

SEQ ID NO: 19155 - DNA, 80 bp, synthetic construct
  misc_feature 1..80: note = Synthetic: >KP886808_1-cand-990-1069
  source 1..80: mol_type = other DNA
tgttttacaagtgtgtatgcagatacatttttgataagattttctgaagtcagacaagtagcacctggtcagactggtgt

SEQ ID NO: 19156 - DNA, 80 bp, synthetic construct
  misc_feature 1..80: note = Synthetic: >KP886808_1-cand-1070-1149
  source 1..80: mol_type = other DNA
tattgcagactacaattataaattgcctgacgattttacaggctgtgttatagcttggaacacagccaagtatgatgtcg

SEQ ID NO: 19157 - DNA, 80 bp, synthetic construct
  misc_feature 1..80: note = Synthetic: >KP886808_1-cand-1120-1199
  source 1..80: mol_type = other DNA
tagcttggaacacagccaagtatgatgtcggtagttatttttataggtctcatcgttcgagtaaattaaaaccgtttgag

SEQ ID NO: 19158 - DNA, 80 bp, synthetic construct
  misc_feature 1..80: note = Synthetic: >KP886808_1-cand-1200-1279
  source 1..80: mol_type = other DNA
agagacctgtcatcagaagaaaatggtgcccgtacacttagtacttatgattttaaccaaaatgtaccccttgaatatca

SEQ ID NO: 19159 - DNA, 80 bp, synthetic construct; identical to SEQ ID NO: 19148
  misc_feature 1..80: note = Synthetic: >KP886809_1-cand-90-169
  source 1..80: mol_type = other DNA

SEQ ID NO: 19160 - DNA, 80 bp, synthetic construct; identical to SEQ ID NO: 19149
  misc_feature 1..80: note = Synthetic: >KP886809_1-cand-170-249
  source 1..80: mol_type = other DNA

SEQ ID NO: 19161 - DNA, 80 bp, synthetic construct; identical to SEQ ID NO: 19150
  misc_feature 1..80: note = Synthetic: >KP886809_1-cand-250-329
  source 1..80: mol_type = other DNA

SEQ ID NO: 19162 - DNA, 80 bp, synthetic construct; identical to SEQ ID NO: 19151
  misc_feature 1..80: note = Synthetic: >KP886809_1-cand-660-739
  source 1..80: mol_type = other DNA

SEQ ID NO: 19163 - DNA, 80 bp, synthetic construct; identical to SEQ ID NO: 19152
  misc_feature 1..80: note = Synthetic: >KP886809_1-cand-750-829
  source 1..80: mol_type = other DNA

SEQ ID NO: 19164 - DNA, 80 bp, synthetic construct; identical to SEQ ID NO: 19153
  misc_feature 1..80: note = Synthetic: >KP886809_1-cand-830-909
  source 1..80: mol_type = other DNA

SEQ ID NO: 19165 - DNA, 80 bp, synthetic construct; identical to SEQ ID NO: 19154
  misc_feature 1..80: note = Synthetic: >KP886809_1-cand-910-989
  source 1..80: mol_type = other DNA

SEQ ID NO: 19166 - DNA, 80 bp, synthetic construct; identical to SEQ ID NO: 19155
  misc_feature 1..80: note = Synthetic: >KP886809_1-cand-990-1069
  source 1..80: mol_type = other DNA

SEQ ID NO: 19167 - DNA, 80 bp, synthetic construct; identical to SEQ ID NO: 19156
  misc_feature 1..80: note = Synthetic: >KP886809_1-cand-1070-1149
  source 1..80: mol_type = other DNA

SEQ ID NO: 19168 - DNA, 80 bp, synthetic construct; identical to SEQ ID NO: 19157
  misc_feature 1..80: note = Synthetic: >KP886809_1-cand-1120-1199
  source 1..80: mol_type = other DNA

SEQ ID NO: 19169 - DNA, 80 bp, synthetic construct; identical to SEQ ID NO: 19158
  misc_feature 1..80: note = Synthetic: >KP886809_1-cand-1200-1279
  source 1..80: mol_type = other DNA

SEQ ID NO: 19170 - DNA, 80 bp, synthetic construct
  misc_feature 1..80: note = Synthetic: >KR822424_1-cand-0-79
  source 1..80: mol_type = other DNA
taacttctagaacgttgtaccaacccaaagttttgtcatactcagatgtcgttaatttaacgtcatgtgagcccaattat

SEQ ID NO: 19171 - DNA, 80 bp, synthetic construct
  misc_feature 1..80: note = Synthetic: >KR822424_1-cand-130-209
  source 1..80: mol_type = other DNA
cgatgaggagtttgggggaatttatactgaactaaatacttcaaaagacctcattaataacatttctacaaattttaact

SEQ ID NO: 19172 - DNA, 80 bp, synthetic construct
  misc_feature 1..80: note = Synthetic: >KR822424_2-cand-0-79
  source 1..80: mol_type = other DNA
tctaccggccggtcatgacttgttgtattaagtatacttacccaagtaatacttctacttgtaacattaaacgtgttgca

SEQ ID NO: 19173 - DNA, 80 bp, synthetic construct
  misc_feature 1..80: note = Synthetic: >KR822424_2-cand-80-159
  source 1..80: mol_type = other DNA
gtgcttataaatctcacagtagatacacaggctttttctatacaagtaccacgtcctgttgttattaaagaatctggtac

SEQ ID NO: 19174 - DNA, 80 bp, synthetic construct
  misc_feature 1..80: note = Synthetic: >KR822424_2-cand-160-239
  source 1..80: mol_type = other DNA
tggagaaactcttgtagtttctatagggaattttgttctgaattctactaatttatttgtctatggtagagttcaaagct

SEQ ID NO: 19175 - DNA, 80 bp, synthetic construct
  misc_feature 1..80: note = Synthetic: >KR822424_2-cand-240-319
  source 1..80: mol_type = other DNA
tattgtttcaaggtaacggaacgtggtatataaatggtgtgccgtcactaccgggttcctattcctttaataatacacag

SEQ ID NO: 19176 - DNA, 80 bp, synthetic construct
  misc_feature 1..80: note = Synthetic: >KR822424_2-cand-320-399
  source 1..80: mol_type = other DNA
gttaatgtaacttatactagttgttatgacagcataggtgcacaaacctggtattttacgaacttatcaagttctaatgc

SEQ ID NO: 19177 - DNA, 80 bp, synthetic construct
  misc_feature 1..80: note = Synthetic: >KR822424_2-cand-400-479
  source 1..80: mol_type = other DNA
tatagtagagttttcatctggtaatgtccttaggtctgtagcatgcacagatggctctattcttaatgctattcagtgta

SEQ ID NO: 19178 - DNA, 80 bp, synthetic construct
  misc_feature 1..80: note = Synthetic: >KR822424_2-cand-480-559
  source 1..80: mol_type = other DNA
ggtatcagcagtttgccttaagtgatggtttgtatggctacgatagtgtagttcctgttgtttcaaatagaacttttgtg

SEQ ID NO: 19179 - DNA, 80 bp, synthetic construct
  misc_feature 1..80: note = Synthetic: >KR822424_2-cand-560-639
  source 1..80: mol_type = other DNA
ccctatcctggtgtgtatgataattcacaacaggatttatataaacttaatgtatctttacgtggtgataacactggtgt

SEQ ID NO: 19180 - DNA, 80 bp, synthetic construct
  misc_feature 1..80: note = Synthetic: >KR822424_2-cand-650-729
  source 1..80: mol_type = other DNA
tatcagtgtgttaacaccaccgcttatacctattttaggatatattgtcaagactcctatgattggaataaagagaagtc

SEQ ID NO: 19181 - DNA, 80 bp, synthetic construct
  misc_feature 1..80: note = Synthetic: >KR822424_2-cand-740-819
  source 1..80: mol_type = other DNA
tcggatacggcttaccagcctggtgaaaacctttatagcaatagtaactataagggtacaatacctaattacccaacttg

SEQ ID NO: 19182 - DNA, 80 bp, synthetic construct
  misc_feature 1..80: note = Synthetic: >KR822424_2-cand-830-909
  source 1..80: mol_type = other DNA
ggtcttagtgttaatagtattaataataatttgggttttaattatttttgtgtaagtaggttgtttagtactaatgatat

SEQ ID NO: 19183 - DNA, 80 bp, synthetic construct
  misc_feature 1..80: note = Synthetic: >KR822424_2-cand-920-999
  source 1..80: mol_type = other DNA
aataattacacttgtctgtatatcactaacgtttacgtccgtgatattggttctattacttactattatgtaggtattag

SEQ ID NO: 19184 - DNA, 80 bp, synthetic construct
  misc_feature 1..80: note = Synthetic: >KR822424_2-cand-1000-1079
  source 1..80: mol_type = other DNA
ttttgaaattggtaatattatttatggagttgaacatcctccattacaatatatatatttaaatgtgtgtcatcattatg

SEQ ID NO: 19185 - DNA, 80 bp, synthetic construct
  misc_feature 1..80: note = Synthetic: >KR822424_2-cand-1090-1169
  source 1..80: mol_type = other DNA
cattaaaggtgtaggtgctatatataacctcactgataatgataattttacgctgtctacaggaggcttagccatctccg

SEQ ID NO: 19186 - DNA, 80 bp, synthetic construct
  misc_feature 1..80: note = Synthetic: >KR822424_2-cand-1170-1249
  source 1..80: mol_type = other DNA
gtggaagtggtcttctagcctttcgtaataacggttctctttatgcagtaaaaccttgcgaatctgtgttaactcaggct

SEQ ID NO: 19187 - DNA, 80 bp, synthetic construct
  misc_feature 1..80: note = Synthetic: >KR822424_2-cand-1250-1329
  source 1..80: mol_type = other DNA
gttcttgtgaatgggacattagcagggttgtacttacctctttcttgtaatgttgttgaaacattaaaccttggtaataa

SEQ ID NO: 19188 - DNA, 80 bp, synthetic construct
  misc_feature 1..80: note = Synthetic: >KR822424_2-cand-1330-1409
  source 1..80: mol_type = other DNA
aactcaagctatagacggaggttgcttagtttataattctacacacacacggtctagaaggtctactccagaactctatg

SEQ ID NO: 19189 - DNA, 80 bp, synthetic construct
  misc_feature 1..80: note = Synthetic: >KR822424_2-cand-1410-1489
  source 1..80: mol_type = other DNA
gttcggagtgtacaggcatttttgttagtattggtaagtcctgtatctatcccaatagtacagtgcttaatcgcactatt

SEQ ID NO: 19190 - DNA, 80 bp, synthetic construct
  misc_feature 1..80: note = Synthetic: >KR822424_2-cand-1490-1569
  source 1..80: mol_type = other DNA
gtaaagcaaggtgttgatacaacagttgttcctttactaaatgttacagcaaatgttagtgttccattagaattgacgct

SEQ ID NO: 19191 - DNA, 80 bp, synthetic construct
  misc_feature 1..80: note = Synthetic: >KR822424_2-cand-1570-1649
  source 1..80: mol_type = other DNA
tgctgtaactactgaataccttcaaacacagtaccagaaagttgttatagactgtgctagatatgtatgtggggaatcat

SEQ ID NO: 19192 - DNA, 80 bp, synthetic construct
  misc_feature 1..80: note = Synthetic: >KR822424_2-cand-1650-1729
  source 1..80: mol_type = other DNA
taaaatgccgtactctcttgcagcagtatggttctttttgtagtagtgttaattcaattcttgcaggtgttaacacactt

SEQ ID NO: 19193 - DNA, 80 bp, synthetic construct
  misc_feature 1..80: note = Synthetic: >KR822424_2-cand-1730-1809
  source 1..80: mol_type = other DNA
gaagatgatggtcttctttcatttgttgaggtgcttaattccggttctaattttgaattccagaattatacagcacacaa

SEQ ID NO: 19194 - DNA, 80 bp, synthetic construct
  misc_feature 1..80: note = Synthetic: >KR822424_2-cand-1810-1889
  source 1..80: mol_type = other DNA
tatgtctaatcttggaggctttgacttatctttagttttgcctaatattacgtcaggaaaaccccaaggtcgttctgcca

SEQ ID NO: 19195 - DNA, 80 bp, synthetic construct
  misc_feature 1..80: note = Synthetic: >KR822424_2-cand-1900-1979
  source 1..80: mol_type = other DNA
attgtttgataaagtaactacgctaggcttcaatgaagttgagcgtggttatgataagtgtatggattcaagaggtggca

SEQ ID NO: 19196 - DNA, 80 bp, synthetic construct
  misc_feature 1..80: note = Synthetic: >KR822424_2-cand-1980-2059
  source 1..80: mol_type = other DNA
aggttactaatgcggctgacctcacttgtgcgcaatactataatggtgttcttgtattaccaggcgtggtagaccctact

SEQ ID NO: 19197 - DNA, 80 bp, synthetic construct; identical to SEQ ID NO: 16781
  misc_feature 1..80: note = Synthetic: >KT696544_1-cand-130-209
  source 1..80: mol_type = other DNA

SEQ ID NO: 19198 - DNA, 80 bp, synthetic construct; identical to SEQ ID NO: 18959
  misc_feature 1..80: note = Synthetic: >KU182964_2-cand-0-79
  source 1..80: mol_type = other DNA

SEQ ID NO: 19199 - DNA, 80 bp, synthetic construct; identical to SEQ ID NO: 18960
  misc_feature 1..80: note = Synthetic: >KU182964_2-cand-690-769
  source 1..80: mol_type = other DNA

SEQ ID NO: 19200 - DNA, 80 bp, synthetic construct; identical to SEQ ID NO: 17177
  misc_feature 1..80: note = Synthetic: >KU215419_1-cand-210-289
  source 1..80: mol_type = other DNA

SEQ ID NO: 19201 - DNA, 80 bp, synthetic construct; identical to SEQ ID NO: 17178
  misc_feature 1..80: note = Synthetic: >KU215419_1-cand-390-469
  source 1..80: mol_type = other DNA

SEQ ID NO: 19202 - DNA, 80 bp, synthetic construct; identical to SEQ ID NO: 17179
  misc_feature 1..80: note = Synthetic: >KU215419_1-cand-480-559
  source 1..80: mol_type = other DNA

SEQ ID NO: 19203 - DNA, 80 bp, synthetic construct; identical to SEQ ID NO: 17180
  misc_feature 1..80: note = Synthetic: >KU215419_2-cand-90-169
  source 1..80: mol_type = other DNA

SEQ ID NO: 19204 - DNA, 80 bp, synthetic construct; identical to SEQ ID NO: 17177
  misc_feature 1..80: note = Synthetic: >KU215420_1-cand-210-289
  source 1..80: mol_type = other DNA

SEQ ID NO: 19205 - DNA, 80 bp, synthetic construct; identical to SEQ ID NO: 17178
  misc_feature 1..80: note = Synthetic: >KU215420_1-cand-390-469
  source 1..80: mol_type = other DNA

SEQ ID NO: 19206 - DNA, 80 bp, synthetic construct; identical to SEQ ID NO: 17179
  misc_feature 1..80: note = Synthetic: >KU215420_1-cand-480-559
  source 1..80: mol_type = other DNA

SEQ ID NO: 19207 - DNA, 80 bp, synthetic construct; identical to SEQ ID NO: 17180
  misc_feature 1..80: note = Synthetic: >KU215420_2-cand-90-169
  source 1..80: mol_type = other DNA

SEQ ID NO: 19208 - DNA, 80 bp, synthetic construct; identical to SEQ ID NO: 17177
  misc_feature 1..80: note = Synthetic: >KU215421_1-cand-210-289
  source 1..80: mol_type = other DNA

SEQ ID NO: 19209 - DNA, 80 bp, synthetic construct; identical to SEQ ID NO: 17178
  misc_feature 1..80: note = Synthetic: >KU215421_1-cand-390-469
  source 1..80: mol_type = other DNA

SEQ ID NO: 19210 - DNA, 80 bp, synthetic construct; identical to SEQ ID NO: 17179
  misc_feature 1..80: note = Synthetic: >KU215421_1-cand-480-559
  source 1..80: mol_type = other DNA

SEQ ID NO: 19211 - DNA, 80 bp, synthetic construct; identical to SEQ ID NO: 17180
  misc_feature 1..80: note = Synthetic: >KU215421_2-cand-90-169
  source 1..80: mol_type = other DNA

SEQ ID NO: 19212 - DNA, 80 bp, synthetic construct; identical to SEQ ID NO: 17177
  misc_feature 1..80: note = Synthetic: >KU215422_1-cand-210-289
  source 1..80: mol_type = other DNA

SEQ ID NO: 19213 - DNA, 80 bp, synthetic construct; identical to SEQ ID NO: 17178
  misc_feature 1..80: note = Synthetic: >KU215422_1-cand-390-469
  source 1..80: mol_type = other DNA

SEQ ID NO: 19214 - DNA, 80 bp, synthetic construct; identical to SEQ ID NO: 17179
  misc_feature 1..80: note = Synthetic: >KU215422_1-cand-480-559
  source 1..80: mol_type = other DNA

SEQ ID NO: 19215 - DNA, 80 bp, synthetic construct; identical to SEQ ID NO: 17180
  misc_feature 1..80: note = Synthetic: >KU215422_2-cand-90-169
  source 1..80: mol_type = other DNA

SEQ ID NO: 19216 - DNA, 80 bp, synthetic construct; identical to SEQ ID NO: 17177
  misc_feature 1..80: note = Synthetic: >KU215423_1-cand-210-289
  source 1..80: mol_type = other DNA

SEQ ID NO: 19217 - DNA, 80 bp, synthetic construct; identical to SEQ ID NO: 17178
  misc_feature 1..80: note = Synthetic: >KU215423_1-cand-390-469
  source 1..80: mol_type = other DNA

SEQ ID NO: 19218 - DNA, 80 bp, synthetic construct; identical to SEQ ID NO: 17179
  misc_feature 1..80: note = Synthetic: >KU215423_1-cand-480-559
  source 1..80: mol_type = other DNA

SEQ ID NO: 19219 - DNA, 80 bp, synthetic construct; identical to SEQ ID NO: 17180
  misc_feature 1..80: note = Synthetic: >KU215423_2-cand-90-169
  source 1..80: mol_type = other DNA

SEQ ID NO: 19220 - DNA, 80 bp, synthetic construct; identical to SEQ ID NO: 17177
  misc_feature 1..80: note = Synthetic: >KU215424_1-cand-210-289
  source 1..80: mol_type = other DNA

SEQ ID NO: 19221 - DNA, 80 bp, synthetic construct; identical to SEQ ID NO: 17178
  misc_feature 1..80: note = Synthetic: >KU215424_1-cand-390-469
  source 1..80: mol_type = other DNA

SEQ ID NO: 19222 - DNA, 80 bp, synthetic construct; identical to SEQ ID NO: 17179
  misc_feature 1..80: note = Synthetic: >KU215424_1-cand-480-559
  source 1..80: mol_type = other DNA

SEQ ID NO: 19223 - DNA, 80 bp, synthetic construct
  misc_feature 1..80: note = Synthetic: >KU215424_2-cand-60-139
  source 1..80: mol_type = other DNA
aattttggagatggaggccagtgtgtattcaaccagagattcgcattgttgacagctaatgatttctatggcttccagtg

SEQ ID NO: 19224 - DNA, 80 bp, synthetic construct; identical to SEQ ID NO: 17177
  misc_feature 1..80: note = Synthetic: >KU215425_1-cand-210-289
  source 1..80: mol_type = other DNA

SEQ ID NO: 19225 - DNA, 80 bp, synthetic construct; identical to SEQ ID NO: 17178
  misc_feature 1..80: note = Synthetic: >KU215425_1-cand-390-469
  source 1..80: mol_type = other DNA

SEQ ID NO: 19226 - DNA, 80 bp, synthetic construct; identical to SEQ ID NO: 17179
  misc_feature 1..80: note = Synthetic: >KU215425_1-cand-480-559
  source 1..80: mol_type = other DNA

SEQ ID NO: 19227 - DNA, 80 bp, synthetic construct; identical to SEQ ID NO: 17180
  misc_feature 1..80: note = Synthetic: >KU215425_2-cand-90-169
  source 1..80: mol_type = other DNA

SEQ ID NO: 19228 - DNA, 80 bp, synthetic construct; identical to SEQ ID NO: 17177
  misc_feature 1..80: note = Synthetic: >KU215426_1-cand-210-289
  source 1..80: mol_type = other DNA

SEQ ID NO: 19229 - DNA, 80 bp, synthetic construct; identical to SEQ ID NO: 17178
  misc_feature 1..80: note = Synthetic: >KU215426_1-cand-390-469
  source 1..80: mol_type = other DNA

SEQ ID NO: 19230 - DNA, 80 bp, synthetic construct; identical to SEQ ID NO: 17179
  misc_feature 1..80: note = Synthetic: >KU215426_1-cand-480-559
  source 1..80: mol_type = other DNA

SEQ ID NO: 19231 - DNA, 80 bp, synthetic construct; identical to SEQ ID NO: 17180
  misc_feature 1..80: note = Synthetic: >KU215426_2-cand-90-169
  source 1..80: mol_type = other DNA

SEQ ID NO: 19232 - DNA, 80 bp, synthetic construct; identical to SEQ ID NO: 17177
  misc_feature 1..80: note = Synthetic: >KU215427_1-cand-210-289
  source 1..80: mol_type = other DNA

SEQ ID NO: 19233 - DNA, 80 bp, synthetic construct; identical to SEQ ID NO: 17178
  misc_feature 1..80: note = Synthetic: >KU215427_1-cand-390-469
  source 1..80: mol_type = other DNA

SEQ ID NO: 19234 - DNA, 80 bp, synthetic construct; identical to SEQ ID NO: 17179
  misc_feature 1..80: note = Synthetic: >KU215427_1-cand-480-559
  source 1..80: mol_type = other DNA

SEQ ID NO: 19235 - DNA, 80 bp, synthetic construct; identical to SEQ ID NO: 17180
  misc_feature 1..80: note = Synthetic: >KU215427_2-cand-90-169
  source 1..80: mol_type = other DNA

SEQ ID NO: 19236 - DNA, 80 bp, synthetic construct
  misc_feature 1..80: note = Synthetic: >KU215427_2-cand-670-749
  source 1..80: mol_type = other DNA
atttcacatttgatgayaatacaactgcgtctatatcttgttttagcagtgctaatgttactgaycaggagcctgcagcc

SEQ ID NO: 19237 - DNA, 80 bp, synthetic construct; identical to SEQ ID NO: 17177
  misc_feature 1..80: note = Synthetic: >KU215428_1-cand-210-289
  source 1..80: mol_type = other DNA

SEQ ID NO: 19238 - DNA, 80 bp, synthetic construct; identical to SEQ ID NO: 17178
  misc_feature 1..80: note = Synthetic: >KU215428_1-cand-390-469
  source 1..80: mol_type = other DNA

SEQ ID NO: 19239 - DNA, 80 bp, synthetic construct; identical to SEQ ID NO: 17179
  misc_feature 1..80: note = Synthetic: >KU215428_1-cand-480-559
  source 1..80: mol_type = other DNA

SEQ ID NO: 19240 - DNA, 80 bp, synthetic construct; identical to SEQ ID NO: 17180
  misc_feature 1..80: note = Synthetic: >KU215428_2-cand-90-169
  source 1..80: mol_type = other DNA

SEQ ID NO: 19241 - DNA, 80 bp, synthetic construct; identical to SEQ ID NO: 19236
  misc_feature 1..80: note = Synthetic: >KU215428_2-cand-670-749
  source 1..80: mol_type = other DNA

SEQ ID NO: 19242 - DNA, 80 bp, synthetic construct
  misc_feature 1..80: note = Synthetic: >KU762338_1-cand-40-119
  source 1..80: mol_type = other DNA
tcctttgccctagacacgttttgtgcacgcgcgatgatttggtaaacccagattatcagcgtttgtccatgcgtgctgca

SEQ ID NO: 19243 - DNA, 80 bp, synthetic construct
  misc_feature 1..80: note = Synthetic: >KU762338_10-cand-180-259
  source 1..80: mol_type = other DNA
cactccatggcaccttttgtttctactgctgacaactttgcggtgttgcgtaccacttgcagtagatttgtttttcctgt

SEQ ID NO: 19244 - DNA, 80 bp, synthetic construct
  misc_feature 1..80: note = Synthetic: >KU762338_10-cand-250-329
  source 1..80: mol_type = other DNA
tttttcctgttgaatcgtcaaaggacaacgttgttgtgttaactacctcccgtggtgtcttctgtaacggcatccatgta

SEQ ID NO: 19245 - DNA, 80 bp, synthetic construct
  misc_feature 1..80: note = Synthetic: >KU762338_10-cand-340-419
  source 1..80: mol_type = other DNA
cagcgctgtccgataatgctagtattgtaagtctgtttagcaccactattttgctgctggacagagttgagcagggctat

SEQ ID NO: 19246 - DNA, 80 bp, synthetic construct
  misc_feature 1..80: note = Synthetic: >KU762338_10-cand-430-509
  source 1..80: mol_type = other DNA
tgtttgtttacattagtcagcaaatactgcgtaattctgagagcaacccccagggggtggttaaccctgaatttgacgat

SEQ ID NO: 19247 - DNA, 80 bp, synthetic construct
  misc_feature 1..80: note = Synthetic: >KU762338_10-cand-490-569
  source 1..80: mol_type = other DNA
ttaaccctgaatttgacgatgtcgaactgtgatgtatgagctggtgggcacggatacatctgtgcttatcgccaatgtac

SEQ ID NO: 19248 - DNA, 80 bp, synthetic construct; identical to SEQ ID NO: 17192
  misc_feature 1..80: note = Synthetic: >KU762338_11-cand-0-79
  source 1..80: mol_type = other DNA

SEQ ID NO: 19249 - DNA, 80 bp, synthetic construct; identical to SEQ ID NO: 17193
  misc_feature 1..80: note = Synthetic: >KU762338_11-cand-90-169
  source 1..80: mol_type = other DNA

SEQ ID NO: 19250 - DNA, 80 bp, synthetic construct; identical to SEQ ID NO: 17194
  misc_feature 1..80: note = Synthetic: >KU762338_11-cand-190-269
  source 1..80: mol_type = other DNA

SEQ ID NO: 19251 - DNA, 80 bp, synthetic construct; identical to SEQ ID NO: 17195
  misc_feature 1..80: note = Synthetic: >KU762338_11-cand-290-369
  source 1..80: mol_type = other DNA

SEQ ID NO: 19252 - DNA, 80 bp, synthetic construct
  misc_feature 1..80: note = Synthetic: >KU762338_11-cand-500-579
  source 1..80: mol_type = other DNA
gctgctccgataaaggaggtgcttggaggtaaaggagctggtatgtccctggttgagctgacaaagttcctaggcaagta

SEQ ID NO: 19253 - DNA, 80 bp, synthetic construct; identical to SEQ ID NO: 17197
  misc_feature 1..80: note = Synthetic: >KU762338_11-cand-590-669
  source 1..80: mol_type = other DNA

SEQ ID NO: 19254 - DNA, 80 bp, synthetic construct
  misc_feature 1..80: note = Synthetic: >KU762338_12-cand-90-169
  source 1..80: mol_type = other DNA
gcctcgtcagcaactttacgtgttctgacgtggcaacagctagccttagtccaaatttgttaagcttggttgtatacgac

SEQ ID NO: 19255 - DNA, 80 bp, synthetic construct
  misc_feature 1..80: note = Synthetic: >KU762338_12-cand-180-259
  source 1..80: mol_type = other DNA
cgggacttaaagttctaacaccggtgtactgggtcagtatacccaccaactttacactagctgcaacaactgagtacatt

SEQ ID NO: 19256 - DNA, 80 bp, synthetic construct
  misc_feature 1..80: note = Synthetic: >KU762338_12-cand-240-319
  source 1..80: mol_type = other DNA
ctgcaacaactgagtacattcaaaccactgcacccaaagtcaatgttgactgtgttaagtacctatgtggcgactctgag

SEQ ID NO: 19257 - DNA, 80 bp, synthetic construct
  misc_feature 1..80: note = Synthetic: >KU762338_12-cand-330-409
  source 1..80: mol_type = other DNA
atgtgctgtcacaatatggggctttctgtgaagacgtcaacaaggctcttgccgacgtcagtgctattattgattcatct

SEQ ID NO: 19258 - DNA, 80 bp, synthetic construct
  misc_feature 1..80: note = Synthetic: >KU762338_12-cand-420-499
  source 1..80: mol_type = other DNA
tggtttcagagcttactgccggtgtgatgtggagtgaaacacctcaagctaatgtcggctcatataacttttccggtctt

SEQ ID NO: 19259 - DNA, 80 bp, synthetic construct
  misc_feature 1..80: note = Synthetic: >KU762338_13-cand-700-779
  source 1..80: mol_type = other DNA
ctcaggggatgcaccggttccgttcgctgcattagtggacgcaaagactacgactgaagcgccttgtgaggatgctagca

SEQ ID NO: 19260 - DNA, 80 bp, synthetic construct
  misc_feature 1..80: note = Synthetic: >KU762338_14-cand-0-79
  source 1..80: mol_type = other DNA
aaaactcctttgttgagcacaactcctcgtgctttttgaatgacacttttgagattccaatgggtacatctcgtgtcaat

SEQ ID NO: 19261 - DNA, 80 bp, synthetic construct
  misc_feature 1..80: note = Synthetic: >KU762338_14-cand-90-169
  source 1..80: mol_type = other DNA
ggtttcaagacggcaaccttttactgtaccatacagcttggctgccgactgaaaactatactttaagtggtgactacccc

SEQ ID NO: 19262 - DNA, 80 bp, synthetic construct
  misc_feature 1..80: note = Synthetic: >KU762338_14-cand-180-259
  source 1..80: mol_type = other DNA
cacgtagtgttggtgtaggctccaatttaccgtttgctcaattctttcagtctgtcgctcgtgcacgtgatagtgcatgc

SEQ ID NO: 19263 - DNA, 80 bp, synthetic construct
  misc_feature 1..80: note = Synthetic: >KU762338_14-cand-450-529
  source 1..80: mol_type = other DNA
ccaaaaagcttgtgcaagttacacagcaagaagactcctgcgcgataccgtatactactattctagaaccaccctcaccg

SEQ ID NO: 19264 - DNA, 80 bp, synthetic construct
  misc_feature 1..80: note = Synthetic: >KU762338_14-cand-540-619
  source 1..80: mol_type = other DNA
tgcgtgctaccatttctaattgtactttcgactttgaatcgctactgcggacattgccgacatacaatttgaagtgctat

SEQ ID NO: 19265 - DNA, 80 bp, synthetic construct
  misc_feature 1..80: note = Synthetic: >KU762338_14-cand-830-909
  source 1..80: mol_type = other DNA
ggcgcttacccaattaaaccaggtggcagacagttgtttaacagctttgtgtctcaagtcttagactcaccaacgtcaca

SEQ ID NO: 19266 - DNA, 80 bp, synthetic construct
  misc_feature 1..80: note = Synthetic: >KU762338_15-cand-170-249
  source 1..80: mol_type = other DNA
atatcaggcgttgccttgaccgtgctcttaactgggcgcgtaccactggcaatgtctcgcttttgagctcaagccttgtg

SEQ ID NO: 19267 - DNA, 80 bp, synthetic construct; identical to SEQ ID NO: 17205
  misc_feature 1..80: note = Synthetic: >KU762338_15-cand-480-559
  source 1..80: mol_type = other DNA

SEQ ID NO: 19268 - DNA, 80 bp, synthetic construct; identical to SEQ ID NO: 17206
  misc_feature 1..80: note = Synthetic: >KU762338_15-cand-960-1039
  source 1..80: mol_type = other DNA

SEQ ID NO: 19269 - DNA, 80 bp, synthetic construct
  misc_feature 1..80: note = Synthetic: >KU762338_16-cand-0-79
  source 1..80: mol_type = other DNA
ctactatgttagtggtatcactcaggaaaccacagccttacaggactttgtagttgacataattgtcaacggtgctaaag

SEQ ID NO: 19270 - DNA, 80 bp, synthetic construct
  misc_feature 1..80: note = Synthetic: >KU762338_16-cand-320-399
  source 1..80: mol_type = other DNA
ttgttgatgatgaacgcaccttccaagaccagattggtgtggtgttccataatggtgttgatatttcatctagagttcca

SEQ ID NO: 19271 - DNA, 80 bp, synthetic construct
  misc_feature 1..80: note = Synthetic: >KU762338_16-cand-640-719
  source 1..80: mol_type = other DNA
gaattttctacaccttggatcagcaccgcatttgacgcgctcaaaggtggtaatccattgccgatagtggaagttttaat

SEQ ID NO: 19272 - DNA, 80 bp, synthetic construct
  misc_feature 1..80: note = Synthetic: >KU762338_16-cand-1290-1369
  source 1..80: mol_type = other DNA
ttactacttcaccaaagcacctatagatgttgtagctgcacctaaagtagttacaccatatgatggctttagacttgttt

SEQ ID NO: 19273 - DNA, 80 bp, synthetic construct
  misc_feature 1..80: note = Synthetic: >KU762338_16-cand-1700-1779
  source 1..80: mol_type = other DNA
atggtttgactgctccaattgttttggatggtgtgaattatgtccccggtaagaagggtgacttactctgtttgaaagag

SEQ ID NO: 19274 - DNA, 80 bp, synthetic construct
  misc_feature 1..80: note = Synthetic: >KU762338_16-cand-1780-1859
  source 1..80: mol_type = other DNA
tttactattatagacttgaaaactttctacgtagaaggaaaccaaccttttgtgttgctgaaagaaaaccacttaagcaa

SEQ ID NO: 19275 - DNA, 80 bp, synthetic construct
  misc_feature 1..80: note = Synthetic: >KU762338_16-cand-1860-1939
  source 1..80: mol_type = other DNA
gctgttggggctaaaaattagcagcaataagcttgttgtcaacaagattagcagtgcgctgatcttgagctatggattat

SEQ ID NO: 19276 - DNA, 80 bp, synthetic construct
  misc_feature 1..80: note = Synthetic: >KU762338_17-cand-0-79
  source 1..80: mol_type = other DNA
ttctgcgtggtgacctgagatttgagggtttcaaccttggtcaatgcagacctggtgaaatgcctgatactgtgactgtg

SEQ ID NO: 19277 - DNA, 80 bp, synthetic construct
  misc_feature 1..80: note = Synthetic: >KU762338_17-cand-400-479
  source 1..80: mol_type = other DNA
accaacaatggtcctgccaccattaagcctgaaaagccacgtgctgctcctatgcaaaatgtctcttggtttgcacctct

SEQ ID NO: 19278 - DNA, 80 bp, synthetic construct
  misc_feature 1..80: note = Synthetic: >KU762338_17-cand-480-559
  source 1..80: mol_type = other DNA
tgtgcagaccgggaagagtgaccttaagttcgcccacggcgaaggtgtgcccgttagccaaggtgtggatggtacatacc

SEQ ID NO: 19279 - DNA, 80 bp, synthetic construct
  misc_feature 1..80: note = Synthetic: >KU762338_17-cand-720-799
  source 1..80: mol_type = other DNA
tgctaacgtcaacaaggttggcaatatgggcactcgtaaccccaacaatgactcagctatccctgtgcaattgccagagg

SEQ ID NO: 19280 - DNA, 80 bp, synthetic construct
  misc_feature 1..80: note = Synthetic: >KU762338_17-cand-800-879
  source 1..80: mol_type = other DNA
gcattcctaagggattttacgctgagggaacacggtccaggaattccagccggtccagctcaaggggatctagtcgcaac

SEQ ID NO: 19281 - DNA, 80 bp, synthetic construct
  misc_feature 1..80: note = Synthetic: >KU762338_17-cand-880-959
  source 1..80: mol_type = other DNA
acctcagcgtctaactccagagctaactcccgtgctagttcaccaggtcgcaatttaccaccgcaggctggtagtgaacc

SEQ ID NO: 19282 - DNA, 80 bp, synthetic construct
  misc_feature 1..80: note = Synthetic: >KU762338_17-cand-1040-1119
  source 1..80: mol_type = other DNA
aggttacaaagcagggagccgctaacatggctgacaagcttcggcataaacgcacacctcataaaggtagtggcgttact

SEQ ID NO: 19283 - DNA, 80 bp, synthetic construct
  misc_feature 1..80: note = Synthetic: >KU762338_17-cand-2270-2349
  source 1..80: mol_type = other DNA
gtttgctttgacaatggtattgtcggcggctgtcagacttaccaccttgcctgcccccagcaccaatcaatacttcacct

SEQ ID NO: 19284 - DNA, 80 bp, synthetic construct
  misc_feature 1..80: note = Synthetic: >KU762338_17-cand-2590-2669
  source 1..80: mol_type = other DNA
tcattgtgtagatggcgaccaacccaactgtagggagctagttagcacctgtcaacatgtcctagttccagttaaagcca

SEQ ID NO: 19285 - DNA, 80 bp, synthetic construct
  misc_feature 1..80: note = Synthetic: >KU762338_17-cand-2670-2749
  source 1..80: mol_type = other DNA
cacctaatgtcacgctctttatgtgcgtgaagttggagggagtaagattccaagaagtgggtgttacacactactactct

SEQ ID NO: 19286 - DNA, 80 bp, synthetic construct
  misc_feature 1..80: note = Synthetic: >KU762338_17-cand-2760-2839
  source 1..80: mol_type = other DNA
cttatggcaaatggcagtgccaacacactaccaccagagaaggtactcttaaatggggtacaaagactataacactcact

SEQ ID NO: 19287 - DNA, 80 bp, synthetic construct
  misc_feature 1..80: note = Synthetic: >KU762338_17-cand-2920-2999
  source 1..80: mol_type = other DNA
ccatcatgaagtggcccatgtttgcgttagcttcaagggcttctacttcgatgagagcgttagattgtttattctgtcta

SEQ ID NO: 19288 - DNA, 80 bp, synthetic construct
  misc_feature 1..80: note = Synthetic: >KU762338_17-cand-3340-3419
  source 1..80: mol_type = other DNA
acgtggctaaacatgcgcgtgctggttacaatggtgcgcacaattttgcagtatgacatctctcgcacaatgtgtaggca

SEQ ID NO: 19289 - DNA, 80 bp, synthetic construct
  misc_feature 1..80: note = Synthetic: >KU762338_3-cand-0-79
  source 1..80: mol_type = other DNA
tatgaatgtagccaagagtgtgttggacaaagatgttgccacggctagaaaactggagcgtatgtctgaaatggcgatga

SEQ ID NO: 19290 - DNA, 80 bp, synthetic construct; identical to SEQ ID NO: 17250
  misc_feature 1..80: note = Synthetic: >KU762338_3-cand-80-159
  source 1..80: mol_type = other DNA

SEQ ID NO: 19291 - DNA, 80 bp, synthetic construct; identical to SEQ ID NO: 17244
  misc_feature 1..80: note = Synthetic: >KU762338_4-cand-0-79
  source 1..80: mol_type = other DNA

SEQ ID NO: 19292 - DNA, 80 bp, synthetic construct; identical to SEQ ID NO: 17245
  misc_feature 1..80: note = Synthetic: >KU762338_4-cand-110-189
  source 1..80: mol_type = other DNA

SEQ ID NO: 19293 - DNA, 80 bp, synthetic construct
  misc_feature 1..80: note = Synthetic: >KU762338_5-cand-160-239
  source 1..80: mol_type = other DNA
aggtgcttaccccatgctgcctagcatttatgccttgttgtttttgtatgtgacatgctattttagtagcgatgtggctg

SEQ ID NO: 19294 - DNA, 80 bp, synthetic construct
  misc_feature 1..80: note = Synthetic: >KU762338_7-cand-100-179
  source 1..80: mol_type = other DNA
cagctgaacgaactagtactcaatctcctcaaggcagggaggttgttaatcagagatgtttcggacgttgctcttagcgg

SEQ ID NO: 19295 - DNA, 80 bp, synthetic construct
  misc_feature 1..80: note = Synthetic: >KU762338_8-cand-110-189
  source 1..80: mol_type = other DNA
aatgcgttgccatacaagggccacctcatgcatccattaatggagttgtcatagaggcacctgaaaaaggcactcagttt

SEQ ID NO: 19296 - DNA, 80 bp, synthetic construct
  misc_feature 1..80: note = Synthetic: >KU762338_8-cand-210-289
  source 1..80: mol_type = other DNA
tggtgagtttgtacagttaagtgatacgctattcactcaatccaggactttagatgactttgaaccacgttctgaaatgg

SEQ ID NO: 19297 - DNA, 80 bp, synthetic construct
  misc_feature 1..80: note = Synthetic: >KU762338_8-cand-310-389
  source 1..80: mol_type = other DNA
agccaacaagacttccttgtgaagtatgacttagagggttatggccttgagcacatagcctacgggcagtttgaaagtgt

SEQ ID NO: 19298 - DNA, 80 bp, synthetic construct
  misc_feature 1..80: note = Synthetic: >KU762338_8-cand-410-489
  source 1..80: mol_type = other DNA
tgataggtgtggttctacgtaagaaagtctctgacatacggcttgaaagtgtccttggtaatgacacggtcacgtcgtat

SEQ ID NO: 19299 - DNA, 80 bp, synthetic construct
  misc_feature 1..80: note = Synthetic: >KU762338_9-cand-300-379
  source 1..80: mol_type = other DNA
tatagtgcctactgatacttgctttgctaataagtttgaaacctttgataattggtaccacaacaggtttggtacatatg

SEQ ID NO: 19300 - DNA, 80 bp, synthetic construct
  misc_feature 1..80: note = Synthetic: >KU973692_2-cand-210-289
  source 1..80: mol_type = other DNA
tattacaatacaagtctgttacttccaattttgtgacaaccctgcatttgtagttacaggcggtgcacaaacaagcactg

SEQ ID NO: 19301 - DNA, 80 bp, synthetic construct
  misc_feature 1..80: note = Synthetic: >KX185057_1-cand-20-99
  source 1..80: mol_type = other DNA
atcaagaacacatcgagtattttgatgcaacttgtagacagaagacaatctatcttacagaagacggtgttaaataccgt

SEQ ID NO: 19302 - DNA, 80 bp, synthetic construct
  misc_feature 1..80: note = Synthetic: >KX266757_1-cand-20-99
  source 1..80: mol_type = other DNA
gtggacattttgaaagaaaaatgtcaccacaattcctaaaaacactcttcttctttttcttttatctcttaaaagcaggc

SEQ ID NO: 19303 - DNA, 80 bp, synthetic construct
  misc_feature 1..80: note = Synthetic: >KX512809_1-cand-40-119
  source 1..80: mol_type = other DNA
atgttcgtttctatgatcattgttacactcattattaacaacctatcatacttcttcacacataatttggtgttagtggt

SEQ ID NO: 19304 - DNA, 80 bp, synthetic construct
  misc_feature 1..80: note = Synthetic: >KX512809_10-cand-210-289
  source 1..80: mol_type = other DNA
gttctccaacgttccttggtttatcaagaggtgtggtgatctgtttgctgaagcgtggtactcagtgtgtgatttcttga

SEQ ID NO: 19305 - DNA, 80 bp, synthetic construct
  misc_feature 1..80: note = Synthetic: >KX512809_10-cand-310-389
  source 1..80: mol_type = other DNA
gtcactattagagaaaccattaaaatgctttgtagtgcagcgtttaccatcagagggtcaaaacctatttttgttgtttc

SEQ ID NO: 19306 - DNA, 80 bp, synthetic construct
  misc_feature 1..80: note = Synthetic: >KX512809_10-cand-410-489
  source 1..80: mol_type = other DNA
ttagaagctgccttagcattttggagtctgtttttgacatgttcacacagactatagagttctttggagttgctgccaag

SEQ ID NO: 19307 - DNA, 80 bp, synthetic construct
  misc_feature 1..80: note = Synthetic: >KX512809_11-cand-130-209
  source 1..80: mol_type = other DNA
gtaacattgcctgcgaattttgaacacacttatatcaatgttactggtaacgtggtgttaatatactatgcgcaccctgt

SEQ ID NO: 19308 - DNA, 80 bp, synthetic construct
  misc_feature 1..80: note = Synthetic: >KX512809_11-cand-230-309
  source 1..80: mol_type = other DNA
cattgtcgcccactgacactcaaactatatgtgttaacacgtcacaattcactttcacctttacctcgaaatgcaacagg

SEQ ID NO: 19309 - DNA, 80 bp, synthetic construct
  misc_feature 1..80: note = Synthetic: >KX512809_11-cand-330-409
  source 1..80: mol_type = other DNA
tgatattggtgtgtcacggatcagtataggtgccggtaattgccctttttcacctgacaaattgaatcagtatttgtctt

SEQ ID NO: 19310 - DNA, 80 bp, synthetic construct
  misc_feature 1..80: note = Synthetic: >KX512809_11-cand-430-509
  source 1..80: mol_type = other DNA
accacacctgctggtagtgattgcgcatttgatgttactgtacaaaataggtttttcacaagagtctttgcacacttgtt

SEQ ID NO: 19311 - DNA, 80 bp, synthetic construct
  misc_feature 1..80: note = Synthetic: >KX512809_12-cand-0-79
  source 1..80: mol_type = other DNA
atagtgcaatacaacaaactgcacaaggtttgtccactgttgcacaagcattgactaaggtgcagaatgtcgtcaactcc

SEQ ID NO: 19312 - DNA, 80 bp, synthetic construct
  misc_feature 1..80: note = Synthetic: >KX512809_12-cand-50-129
  source 1..80: mol_type = other DNA
ttgactaaggtgcagaatgtcgtcaactcccaaggcaaggccattaatcaactcactgcacaactgcaaaacaactttca

SEQ ID NO: 19313 - DNA, 80 bp, synthetic construct
  misc_feature 1..80: note = Synthetic: >KX512809_12-cand-140-219
  source 1..80: mol_type = other DNA
agttctattgaagatatttattatagacttgatgaggttaatgctgatgcgcaagtggaccgtctcatcacggggagact

SEQ ID NO: 19314 - DNA, 80 bp, synthetic construct
  misc_feature 1..80: note = Synthetic: >KX512809_12-cand-230-309
  source 1..80: mol_type = other DNA
aatgcatttgtaactcaagcactaaccaatcaagcccaagttcgtgctagcagacaattagcaaaggagaagatcaatga

SEQ ID NO: 19315 - DNA, 80 bp, synthetic construct
  misc_feature 1..80: note = Synthetic: >KX512809_12-cand-300-379
  source 1..80: mol_type = other DNA
agatcaatgagtgtgtgaggtcacaatctagcagatttggcttctgtggtaacggcacacacttattttctctggctaat

SEQ ID NO: 19316 - DNA, 80 bp, synthetic construct
  misc_feature 1..80: note = Synthetic: >KX512809_12-cand-390-469
  source 1..80: mol_type = other DNA
gaggtattatgctatttcacacagttttactgcccacatcctacaaaaccgtgactgcatggtctggtgtttgtgcaaca

SEQ ID NO: 19317 - DNA, 80 bp, synthetic construct
  misc_feature 1..80: note = Synthetic: >KX512809_12-cand-480-559
  source 1..80: mol_type = other DNA
aaactatgggttttattgttaaagatgtgtcgttgacgttatttaaaaatcatgatgataagttctacttgacaccgcgt

SEQ ID NO: 19318 - DNA, 80 bp, synthetic construct
  misc_feature 1..80: note = Synthetic: >KX512809_13-cand-130-209
  source 1..80: mol_type = other DNA
tttgtgttttagagctctttcattgaaggaaagcatcattgtcgagcctttcaagcacaagtataaaatgcctaaatgtc

SEQ ID NO: 19319 - DNA, 80 bp, synthetic construct
  misc_feature 1..80: note = Synthetic: >KX512809_13-cand-330-409
  source 1..80: mol_type = other DNA
acatagtctgcccaaaaattttgcacaagtttgataacggtataatgtggtaccgttgcatgaaaggtgttacaggtcct

SEQ ID NO: 19320 - DNA, 80 bp, synthetic construct
  misc_feature 1..80: note = Synthetic: >KX512809_13-cand-530-609
  source 1..80: mol_type = other DNA
tttgatctgaatgttgccggcattgaactcgccggtttcaaaacaccaaacggaaaaacctttctagattttggtgatga

SEQ ID NO: 19321 - DNA, 80 bp, synthetic construct
  misc_feature 1..80: note = Synthetic: >KX512809_14-cand-100-179
  source 1..80: mol_type = other DNA
agagtgcactagaagacgtacgcaatgattgcgagtctgctgatgttgccaaatgtgattcttccgctagtgtcaaactc

SEQ ID NO: 19322 - DNA, 80 bp, synthetic construct
  misc_feature 1..80: note = Synthetic: >KX512809_14-cand-190-269
  source 1..80: mol_type = other DNA
ttaatgagtcagcgtctcccacatttacgtctgcgcaacaagtctccactataaagccattttttgaaacgggtttgctt

SEQ ID NO: 19323 - DNA, 80 bp, synthetic construct
  misc_feature 1..80: note = Synthetic: >KX512809_14-cand-280-359
  source 1..80: mol_type = other DNA
gaggtgatgttaaaatgttagttgacgccatcaagcctaaagtcttagtaaacgctgccaattcacaccttcaacataag

SEQ ID NO: 19324 - DNA, 80 bp, synthetic construct
  misc_feature 1..80: note = Synthetic: >KX512809_14-cand-360-439
  source 1..80: mol_type = other DNA
ggtggtgtcgcaaaagcaattgatgtttttacgggcggagcacttagtttggaatccaccaattaccttaaacgttataa

SEQ ID NO: 19325 - DNA, 80 bp, synthetic construct
  misc_feature 1..80: note = Synthetic: >KX512809_14-cand-460-539
  source 1..80: mol_type = other DNA
tggtagtttttaatgatgtgtttgaaggtcttaacattgctaatgctgtgggaccacgtgtgtctgaggagcggtatgaa

SEQ ID NO: 19326 - DNA, 80 bp, synthetic construct
  misc_feature 1..80: note = Synthetic: >KX512809_15-cand-0-79
  source 1..80: mol_type = other DNA
attttattaaagattatagcaagcgtttaccaacaagttctaatgtagtgttaggagattattttcctacagtgcaacca

SEQ ID NO: 19327 - DNA, 80 bp, synthetic construct
  misc_feature 1..80: note = Synthetic: >KX512809_15-cand-170-249
  source 1..80: mol_type = other DNA
aacaccacagtttcagattgttttgtggtacatctctacggtaacccgtacactgtgactgttaaaatatcagctcatta

SEQ ID NO: 19328 - DNA, 80 bp, synthetic construct
  misc_feature 1..80: note = Synthetic: >KX512809_15-cand-260-339
  source 1..80: mol_type = other DNA
cacgaatataatgttatgtgcatttgtcaagggaagcatgaaccgtataggtacgattgtttaagcgatagcaactcttg

SEQ ID NO: 19329 - DNA, 80 bp, synthetic construct
  misc_feature 1..80: note = Synthetic: >KX512809_15-cand-360-439
  source 1..80: mol_type = other DNA
atcgtttcactgcctgtgctaatattagcacctgtggtgacactctttttggtttgcgctggtcgaattcagaattggca

SEQ ID NO: 19330 - DNA, 80 bp, synthetic construct
  misc_feature 1..80: note = Synthetic: >KX512809_15-cand-450-529
  source 1..80: mol_type = other DNA
ctggcaacgtgtatcgctttaggttagctaaccattggtataattatgccaccatatcagatcctgatccctataaaggt

SEQ ID NO: 19331 - DNA, 80 bp, synthetic construct
  misc_feature 1..80: note = Synthetic: >KX512809_15-cand-540-619
  source 1..80: mol_type = other DNA
ggtggtttaaccctgtgcaaaatttcacttattacaatgttagcaaacttagcaatggtactgttatctattccaattgc

SEQ ID NO: 19332 - DNA, 80 bp, synthetic construct
  misc_feature 1..80: note = Synthetic: >KX512809_15-cand-630-709
  source 1..80: mol_type = other DNA
gcgcagaatatgcgactaacgtatttgccgttgaggaaggcgggtttataccaacagattttagtttcaacaattggttt

SEQ ID NO: 19333 - DNA, 80 bp, synthetic construct
  misc_feature 1..80: note = Synthetic: >KX512809_15-cand-810-889
  source 1..80: mol_type = other DNA
cgctaattgtggatttcaaccaaacccctagccaatgtaatggtgctactgttaatggcagttttgatgttgttaggttc

SEQ ID NO: 19334 - DNA, 80 bp, synthetic construct
  misc_feature 1..80: note = Synthetic: >KX512809_16-cand-0-79
  source 1..80: mol_type = other DNA
tgagtttgttttgcataaacttgaaccattgatgtgtgaaagtggctctgtaactttagacaattttaagggttgtgata

SEQ ID NO: 19335 - DNA, 80 bp, synthetic construct
  misc_feature 1..80: note = Synthetic: >KX512809_16-cand-70-149
  source 1..80: mol_type = other DNA
ggttgtgatatttgttacaaaccaagtaccgttacaggtgctgttgtagccgctcctctacaagctaaaggggataccac

SEQ ID NO: 19336 - DNA, 80 bp, synthetic construct
  misc_feature 1..80: note = Synthetic: >KX512809_16-cand-260-339
  source 1..80: mol_type = other DNA
acgtgtgttttaatggttctgccagtcgtggacattatacatacagttctagaactggtactgtttatgacgctgataaa

SEQ ID NO: 19337 - DNA, 80 bp, synthetic construct
  misc_feature 1..80: note = Synthetic: >KX512809_16-cand-350-429
  source 1..80: mol_type = other DNA
ttaaagtggacgacttaagcgtagcatctgttctcatgttaactggctacaaattaccagtagtccacgctcccagcgta

SEQ ID NO: 19338 - DNA, 80 bp, synthetic construct
  misc_feature 1..80: note = Synthetic: >KX512809_16-cand-530-609
  source 1..80: mol_type = other DNA
ttgttacaatttttaagtaccttttgtgtttttattgtttctttctagaacgctggacaaagcctaagaggcttaaagtg

SEQ ID NO: 19339 - DNA, 80 bp, synthetic construct
  misc_feature 1..80: note = Synthetic: >KX512809_16-cand-620-699
  source 1..80: mol_type = other DNA
caccttttgctttaaagtcattggatgtaaaattacgagctcttaattctgtaaaattgtttacaaacactaaattttgg

SEQ ID NO: 19340 - DNA, 80 bp, synthetic construct
  misc_feature 1..80: note = Synthetic: >KX512809_16-cand-710-789
  source 1..80: mol_type = other DNA
agtttttgttaggtttattgttgttgtataacttgttgtatgttatggtaagtgtaccatttatacataggtttgcttgt

SEQ ID NO: 19341 - DNA, 80 bp, synthetic construct
  misc_feature 1..80: note = Synthetic: >KX512809_16-cand-800-879
  source 1..80: mol_type = other DNA
ctaaagcgtatgcaaactccagctttgtgaaagcggaagtttgcacacgctcagttttgtgtaaggcgtgtttggcgtct

SEQ ID NO: 19342 - DNA, 80 bp, synthetic construct
  misc_feature 1..80: note = Synthetic: >KX512809_16-cand-890-969
  source 1..80: mol_type = other DNA
tgtctgattttgataacctcaaagttgtttgggattacaagtccgatcctctttggagcaaaatgttgcaactagtttat

SEQ ID NO: 19343 - DNA, 80 bp, synthetic construct
  misc_feature 1..80: note = Synthetic: >KX512809_16-cand-980-1059
  source 1..80: mol_type = other DNA
ttatggtgtttggtaacaatgtgttaagggtcgctatgctctattttgtcgcacagtgtttaaacacatggttttcctac

SEQ ID NO: 19344 - DNA, 80 bp, synthetic construct
  misc_feature 1..80: note = Synthetic: >KX512809_2-cand-10-89
  source 1..80: mol_type = other DNA
catacaatcgttaactgtggactttaatggtgttttgtttgaggcgcatagacgtattgtcggtaactcatttaatgtag

SEQ ID NO: 19345 - DNA, 80 bp, synthetic construct
  misc_feature 1..80: note = Synthetic: >KX512809_2-cand-100-179
  source 1..80: mol_type = other DNA
ttgtaagacgctgcgtgattgttatgaagcttgcaaaaccgatgttccttacaatgtctttgaagacgttgttaacaatg

SEQ ID NO: 19346 - DNA, 80 bp, synthetic construct
  misc_feature 1..80: note = Synthetic: >KX512809_3-cand-120-199
  source 1..80: mol_type = other DNA
ttggtatcttggtaagtatggtaaaagtttgtcttatgctaaaacctgtcccattgttgttggcactgtgtttgatattg

SEQ ID NO: 19347 - DNA, 80 bp, synthetic construct
  misc_feature 1..80: note = Synthetic: >KX512809_4-cand-110-189
  source 1..80: mol_type = other DNA
ttaaacaatcacaaaataactgctgggttaatgcagctggttatcaattacagtgtcttaatgtgcttgatagtgaagag

SEQ ID NO: 19348 - DNA, 80 bp, synthetic construct
  misc_feature 1..80: note = Synthetic: >KX512809_5-cand-0-79
  source 1..80: mol_type = other DNA
ggtatgtttgcaatggcaatccacggtgtgataggttgttaacacaatatgttagtgcctgccataccatagagcaatct

SEQ ID NO: 19349 - DNA, 80 bp, synthetic construct
  misc_feature 1..80: note = Synthetic: >KX512809_5-cand-100-179
  source 1..80: mol_type = other DNA
agaagcgctggagctcgagtctatgatttcaatctctgataatgcattagagttggcatcagttgagatctttaacaatt

SEQ ID NO: 19350 - DNA, 80 bp, synthetic construct
  misc_feature 1..80: note = Synthetic: >KX512809_7-cand-0-79
  source 1..80: mol_type = other DNA
cattacttacaacttttgtgaagcacaaaatgttgtatttcatgtcattccttctacctagtgttattcttatgacagtt

SEQ ID NO: 19351 - DNA, 80 bp, synthetic construct
  misc_feature 1..80: note = Synthetic: >KX512809_8-cand-0-79
  source 1..80: mol_type = other DNA
tatagagaaagtgcacataaattagtgttctactcaactaaacacatgattgctaacttacttgtaggcctgtttttaca

SEQ ID NO: 19352 - DNA, 80 bp, synthetic construct
  misc_feature 1..80: note = Synthetic: >KX512810_1-cand-40-119
  source 1..80: mol_type = other DNA
taatgctgcacctagtggtatcatgctatttcatacagtcttagtgcccacgtcttacacaagtgtaacagcgtggtccg

SEQ ID NO: 19353 - DNA, 80 bp, synthetic construct
  misc_feature 1..80: note = Synthetic: >KX512810_10-cand-0-79
  source 1..80: mol_type = other DNA
tttgttaaatagtcataacaattatgttaattctaggtctgttagttctgtctctattctcaaattctttagggcaagaa

SEQ ID NO: 19354 - DNA, 80 bp, synthetic construct
  misc_feature 1..80: note = Synthetic: >KX512810_10-cand-90-169
  source 1..80: mol_type = other DNA
atcaacatcccacatacaactgggaaagattagattattttgaaggttcctacatcgaaattgataaatctgtggtttta

SEQ ID NO: 19355 - DNA, 80 bp, synthetic construct
  misc_feature 1..80: note = Synthetic: >KX512810_10-cand-280-359
  source 1..80: mol_type = other DNA
agactcacctttctacaagtttgtgaacaccttttacgtggctaaattcacagatggtaagtttgacaatcgtgccactc

SEQ ID NO: 19356 - DNA, 80 bp, synthetic construct
  misc_feature 1..80: note = Synthetic: >KX512810_10-cand-500-579
  source 1..80: mol_type = other DNA
actaacagacggtatttcgttaagtactgtcccggtggtaccaatcatttttgttttacagataaattggtaatcagaag

SEQ ID NO: 19357 - DNA, 80 bp, synthetic construct
  misc_feature 1..80: note = Synthetic: >KX512810_10-cand-600-679
  source 1..80: mol_type = other DNA
tgtctaataataataaaattgaacatgttgatttataagaagatcttcgggcgagtaccgttagatctactcttgcacag

SEQ ID NO: 19358 - DNA, 80 bp, synthetic construct
  misc_feature 1..80: note = Synthetic: >KX512810_11-cand-20-99
  source 1..80: mol_type = other DNA
cataaacttgaaccattgctgtgtgaaagtggctccgtaactttagacaattttaaaggttgtgatatttgttacaaacc

SEQ ID NO: 19359 - DNA, 80 bp, synthetic construct
  misc_feature 1..80: note = Synthetic: >KX512810_11-cand-120-199
  source 1..80: mol_type = other DNA
ttgtagccgctcctctacaagctaaaggggataacacagtgtgtacccatggtaagagcgttacaacacgtgtaactaat

SEQ ID NO: 19360 - DNA, 80 bp, synthetic construct
  misc_feature 1..80: note = Synthetic: >KX512810_11-cand-530-609
  source 1..80: mol_type = other DNA
aaagcctgtgttgcaatttttaagtaccttttgtgtttgtattgtttctttttagaacgttggacaaagcctaagaggct

SEQ ID NO: 19361 - DNA, 80 bp, synthetic construct
  misc_feature 1..80: note = Synthetic: >KX512810_11-cand-630-709
  source 1..80: mol_type = other DNA
cttttgctttaaagccattggatgtaaaattgcgagctcttaattctgtaaaattgcttacaaacaccaaattttggttc

SEQ ID NO: 19362 - DNA, 80 bp, synthetic construct
  misc_feature 1..80: note = Synthetic: >KX512810_12-cand-0-79
  source 1..80: mol_type = other DNA
attttattaaagattacagtaggcgtttaccaacaagttcccatgtagtgttaggagattatttccctacagtgcaacca

SEQ ID NO: 19363 - DNA, 80 bp, synthetic construct
  misc_feature 1..80: note = Synthetic: >KX512810_12-cand-160-239
  source 1..80: mol_type = other DNA
gaaaaagagtactacctcagtcacagattgttttgtggtacatctctacggcaaaccgtacactgtaactgttaaaatat

SEQ ID NO: 19364 - DNA, 80 bp, synthetic construct
  misc_feature 1..80: note = Synthetic: >KX512810_12-cand-250-329
  source 1..80: mol_type = other DNA
cattatagctaaagatcgtaatgttatgtgcatttgcagagggaagcacgaaccgtacaggtacgattgtataaacacag

SEQ ID NO: 19365 - DNA, 80 bp, synthetic construct
  misc_feature 1..80: note = Synthetic: >KX512810_12-cand-330-409
  source 1..80: mol_type = other DNA
gcaactactgtggtgaggactgcataacgcaccctttcacaacttgtgccaatgctagcacctgtggtgacactctcttt

SEQ ID NO: 19366 - DNA, 80 bp, synthetic construct
  misc_feature 1..80: note = Synthetic: >KX512810_12-cand-420-499
  source 1..80: mol_type = other DNA
ggtcaaattccgaattggcagcatatttatctggcaacgtgtatcgctttagattagccaaccattggtacaattatgcc

SEQ ID NO: 19367 - DNA, 80 bp, synthetic construct
  misc_feature 1..80: note = Synthetic: >KX512810_12-cand-510-589
  source 1..80: mol_type = other DNA
atcctgatccgtatagaggtgctcttagttggtggtttaacccggtgcaaagtttcacttattacaatgttagcaaactt

SEQ ID NO: 19368 - DNA, 80 bp, synthetic construct
  misc_feature 1..80: note = Synthetic: >KX512810_12-cand-590-669
  source 1..80: mol_type = other DNA
agtaatggtactgttgtctggtctaattgtacccataattgtgcagattatgtgaccaacgtatttgccgttgaggaagg

SEQ ID NO: 19369 - DNA, 80 bp, synthetic construct
  misc_feature 1..80: note = Synthetic: >KX512810_12-cand-770-849
  source 1..80: mol_type = other DNA
gttaattgtttaacacctgtgcctagttttggtgaggaggcgctaaccttggatttcaaccaaatccctagccaatgtaa

SEQ ID NO: 19370 - DNA, 80 bp, synthetic construct
  misc_feature 1..80: note = Synthetic: >KX512810_13-cand-10-89
  source 1..80: mol_type = other DNA
cccagatacttataaagaaaaacttacttgtgacattggtacatcttatagttttgacggttctatagatgatgccaccg

SEQ ID NO: 19371 - DNA, 80 bp, synthetic construct
  misc_feature 1..80: note = Synthetic: >KX512810_13-cand-90-169
  source 1..80: mol_type = other DNA
ctaagcttaacactcagttgcaattttattgcgataatactttgtgttttagagctctttcattgaaagaaagcatcatt

SEQ ID NO: 19372 - DNA, 80 bp, synthetic construct
  misc_feature 1..80: note = Synthetic: >KX512810_13-cand-170-249
  source 1..80: mol_type = other DNA
gtcgaacctttcaagcttaagtataagatgcctaaatgtcttaaaaatcatacaggcctctgggaaatcattctgaatgg

SEQ ID NO: 19373 - DNA, 80 bp, synthetic construct
  misc_feature 1..80: note = Synthetic: >KX512810_13-cand-330-409
  source 1..80: mol_type = other DNA
acttagtctgcccaaaactattgcacaagtttgacaatggtataatgtggtaccgctgcatgaaaggtgttacaggtcct

SEQ ID NO: 19374 - DNA, 80 bp, synthetic construct
  misc_feature 1..80: note = Synthetic: >KX512810_13-cand-500-579
  source 1..80: mol_type = other DNA
tgctaccaaaaactctgtggtgttaagacctttgatttgaatattgccggcatcgaactcgccggttttaaaacaccaaa

SEQ ID NO: 19375 - DNA, 80 bp, synthetic construct
  misc_feature 1..80: note = Synthetic: >KX512810_13-cand-590-669
  source 1..80: mol_type = other DNA
tttctagattttggcgatgatgtcatcgaactttttgatgatgaacctgtacgttgtttcacaggtgctactgtgcctgt

SEQ ID NO: 19376 - DNA, 80 bp, synthetic construct
  misc_feature 1..80: note = Synthetic: >KX512810_13-cand-670-749
  source 1..80: mol_type = other DNA
agccgtttcagattttgaagatgttgttcggaatgatgtccttttagaaaactgtgactacctacccccaaaagctgacg

SEQ ID NO: 19377 - DNA, 80 bp, synthetic construct
  misc_feature 1..80: note = Synthetic: >KX512810_13-cand-750-829
  source 1..80: mol_type = other DNA
gtgtagttgttaacttagatggttacacattctacactactgataatgagaagttctacccttttggcgattgtaaagtc

SEQ ID NO: 19378 - DNA, 80 bp, synthetic construct
  misc_feature 1..80: note = Synthetic: >KX512810_13-cand-830-909
  source 1..80: mol_type = other DNA
gttccaaaattgtataacaaagttggtggtggtaggaatgtaacctttagtgacgatgttgaagtcagagaagttgaacc

SEQ ID NO: 19379 - DNA, 80 bp, synthetic construct
  misc_feature 1..80: note = Synthetic: >KX512810_13-cand-880-959
  source 1..80: mol_type = other DNA
tgacgatgttgaagtcagagaagttgaacccatcttcaaagttaaagtcacctttgagtttgatgataaaactatagaag

SEQ ID NO: 19380 - DNA, 80 bp, synthetic construct
  misc_feature 1..80: note = Synthetic: >KX512810_13-cand-960-1039
  source 1..80: mol_type = other DNA
aagttttaaacaaggttattggtaacactgtcagcttcgaaggtgctaactgggagactcttgatgatttgttgaccaca

SEQ ID NO: 19381 - DNA, 80 bp, synthetic construct
  misc_feature 1..80: note = Synthetic: >KX512810_13-cand-1040-1119
  source 1..80: mol_type = other DNA
caggttgatgccgtatttactcaactatctcaagcaggtttaaatccaccggactattatatatatgatggctgtggtgg

SEQ ID NO: 19382 - DNA, 80 bp, synthetic construct
  misc_feature 1..80: note = Synthetic: >KX512810_13-cand-1120-1199
  source 1..80: mol_type = other DNA
ttttgatgtgacctgccctgaaggcatcatggtttcacagtatgacctgggttctgacggtgtcaatgcgtgtgattcag

SEQ ID NO: 19383 - DNA, 80 bp, synthetic construct
  misc_feature 1..80: note = Synthetic: >KX512810_13-cand-1200-1279
  source 1..80: mol_type = other DNA
actgtattgatgaccattgtttgtcagatgaacaggtagatgctagtgtcaatgattgtaacttggaacatgtggaggaa

SEQ ID NO: 19384 - DNA, 80 bp, synthetic construct
  misc_feature 1..80: note = Synthetic: >KX512810_13-cand-1360-1439
  source 1..80: mol_type = other DNA
cagtataattaacggtaaagttgtacttaaacagtcacaaaataactgctgggttaatgcagctggttatcagttacagt

SEQ ID NO: 19385 - DNA, 80 bp, synthetic construct
  misc_feature 1..80: note = Synthetic: >KX512810_13-cand-1440-1519
  source 1..80: mol_type = other DNA
gtcttaatgtgcttgatagtgaagagttcaagcagtactgtgatggtaatgttgagagtttggtacaacttatgtatgcc

SEQ ID NO: 19386 - DNA, 80 bp, synthetic construct
  misc_feature 1..80: note = Synthetic: >KX512810_13-cand-1520-1599
  source 1..80: mol_type = other DNA
atgactaacagaaatattggtgatttaggtgaagccgaacatgtgttagagctttgtttggcaggtttggaaacagcaac

SEQ ID NO: 19387 - DNA, 80 bp, synthetic construct
  misc_feature 1..80: note = Synthetic: >KX512810_13-cand-1600-1679
  source 1..80: mol_type = other DNA
agtgacactgaccgcacaatgtaattgtggcacatttgaagatgtcattgcaggctgtgtttttaggatgtgttgtacaa

SEQ ID NO: 19388 - DNA, 80 bp, synthetic construct
  misc_feature 1..80: note = Synthetic: >KX512810_13-cand-1680-1759
  source 1..80: mol_type = other DNA
gtgatacgtttgactatggtatgtgtggcaattgtaacaatgttaagaagactactattgtgaaagttgaaggtacaggt

SEQ ID NO: 19389 - DNA, 80 bp, synthetic construct
  misc_feature 1..80: note = Synthetic: >KX512810_13-cand-1770-1849
  source 1..80: mol_type = other DNA
atgaacctaaaacttacaagcctcttgttacgccagtttgcaaagcaatttttaaaggtaacactgatggtggccactat

SEQ ID NO: 19390 - DNA, 80 bp, synthetic construct
  misc_feature 1..80: note = Synthetic: >KX512810_13-cand-1860-1939
  source 1..80: mol_type = other DNA
acgtccaagccaacgttctagttgacggttttggtctgcacccagtgaagaacataccattcacttctgtttgttttgtt

SEQ ID NO: 19391 - DNA, 80 bp, synthetic construct
  misc_feature 1..80: note = Synthetic: >KX512810_13-cand-2040-2119
  source 1..80: mol_type = other DNA
cagacgtacgcaatgattgcgagtctgctggtgttgctaaatgtgattcttccgctagtgtcgaaccagcgaatgtaacc

SEQ ID NO: 19392 - DNA, 80 bp, synthetic construct
  misc_feature 1..80: note = Synthetic: >KX512810_13-cand-2120-2199
  source 1..80: mol_type = other DNA
aatgaaccggtgcctcccacagttacggctgtgcaacaagtctccactataaagccattttttgaaactggtttgattaa

SEQ ID NO: 19393 - DNA, 80 bp, synthetic construct
  misc_feature 1..80: note = Synthetic: >KX512810_13-cand-2200-2279
  source 1..80: mol_type = other DNA
gttttatagaggtgatgttaaagtgttagttgatgccatcaagcctaaagtcttagtaaatgctgccaacccataccttc

SEQ ID NO: 19394 - DNA, 80 bp, synthetic construct
  misc_feature 1..80: note = Synthetic: >KX512810_13-cand-2280-2359
  source 1..80: mol_type = other DNA
aacataagggtggtgtcgcaaaagctattgatgtttttacgggcggtgcacttagtttggaatctaccaattaccttaaa

SEQ ID NO: 19395 - DNA, 80 bp, synthetic construct
  misc_feature 1..80: note = Synthetic: >KX512810_13-cand-2360-2439
  source 1..80: mol_type = other DNA
cgttataaacctataccggctggtaatgtggtagtttttaatgatgtgcttgaaggccttaatattgccaatgcagtggg

SEQ ID NO: 19396 - DNA, 80 bp, synthetic construct
  misc_feature 1..80: note = Synthetic: >KX512810_13-cand-2440-2519
  source 1..80: mol_type = other DNA
accacgtgtgtctgaggaacggtacgaacagaaacttgcttctgtttaccgtaaattggcgaaggttgaaggttctatgt

SEQ ID NO: 19397 - DNA, 80 bp, synthetic construct
  misc_feature 1..80: note = Synthetic: >KX512810_13-cand-2600-2679
  source 1..80: mol_type = other DNA
acaagtgtctctgtgtttgtatacacagaagaggagcagagtaaagttttacagtactttgaaacacctgtcacagttct

SEQ ID NO: 19398 - DNA, 80 bp, synthetic construct
  misc_feature 1..80: note = Synthetic: >KX512810_2-cand-0-79
  source 1..80: mol_type = other DNA
ttgcaacgtctggatacatgttaactaatatgcttatagctctgtttgccataacagtctgttatgcatttttgaagttc

SEQ ID NO: 19399 - DNA, 80 bp, synthetic construct
  misc_feature 1..80: note = Synthetic: >KX512810_2-cand-120-199
  source 1..80: mol_type = other DNA
tcattgttacactctttattaacaacctatcatactttttcacacataatttggtgttagtagttgtttacgctgtagcg

SEQ ID NO: 19400 - DNA, 80 bp, synthetic construct
  misc_feature 1..80: note = Synthetic: >KX512810_3-cand-160-239
  source 1..80: mol_type = other DNA
tgtgaacagagatctcatacaatcgttaactgtggattttaatggtgttttgtttgatgcgcataaacgtgttgttagta

SEQ ID NO: 19401 - DNA, 80 bp, synthetic construct
  misc_feature 1..80: note = Synthetic: >KX512810_6-cand-0-79
  source 1..80: mol_type = other DNA
gtgcatataaattagtgttctactcaactaaacacatgattgctaacttgcttgtaggcctgtttttacaatctatatca

SEQ ID NO: 19402 - DNA, 80 bp, synthetic construct
  misc_feature 1..80: note = Synthetic: >KX512810_7-cand-0-79
  source 1..80: mol_type = other DNA
acagttgtctgccaacctaccagatgggttctaccctgtttcctctttaaacctgcccaacgctaatttgagttttgtaa

SEQ ID NO: 19403 - DNA, 80 bp, synthetic construct
  misc_feature 1..80: note = Synthetic: >KX512810_7-cand-120-199
  source 1..80: mol_type = other DNA
aggtaatgtgaaagtggctgtttatggcaagcttcaaattttgcctcaaagtagcaatgtaactctttactctggtactg

SEQ ID NO: 19404 - DNA, 80 bp, synthetic construct
  misc_feature 1..80: note = Synthetic: >KX512810_7-cand-230-309
  source 1..80: mol_type = other DNA
ttacacttaattttgactcccattgcagcgttgaatatggctctacatgtactggctcagctaggacagaggttatagtt

SEQ ID NO: 19405 - DNA, 80 bp, synthetic construct
  misc_feature 1..80: note = Synthetic: >KX512810_8-cand-210-289
  source 1..80: mol_type = other DNA
gttctccaacgttccctggtttatcaagaggtgtggtgatctgtttgctgaagcatggtactcagtgtgtgagttcttga

SEQ ID NO: 19406 - DNA, 80 bp, synthetic construct
  misc_feature 1..80: note = Synthetic: >KX512810_8-cand-310-389
  source 1..80: mol_type = other DNA
gtcactattagagaaactattaaaatgctttgtagtgcagcgtttaccatcagagggtcaaaacctatctttgttgtttc

SEQ ID NO: 19407 - DNA, 80 bp, synthetic construct
  misc_feature 1..80: note = Synthetic: >KX512810_8-cand-410-489
  source 1..80: mol_type = other DNA
ttagaagctgcattagcattttagagtctgtttttgacatgttcacacagactatagagttttttggagttgctgccaag

SEQ ID NO: 19408 - DNA, 80 bp, synthetic construct
  misc_feature 1..80: note = Synthetic: >KX512810_9-cand-0-79
  source 1..80: mol_type = other DNA
gtgtgactatcatgttgtctttcaacaacaaccccatgagccacactttgccaactgttgctattggccgtaaaagtggt

SEQ ID NO: 19409 - DNA, 80 bp, synthetic construct
  misc_feature 1..80: note = Synthetic: >KX512810_9-cand-110-189
  source 1..80: mol_type = other DNA
aaacaagttgcaatgctcattgttgcagtcttgttagcatggggtttgtgttgcatctacaatggttacaccccagcacg

SEQ ID NO: 19410 - DNA, 80 bp, synthetic construct
  misc_feature 1..80: note = Synthetic: >KX512810_9-cand-220-299
  source 1..80: mol_type = other DNA
ggttattaagagtggtaaaattcagagttttgatgattctatcacttgtgtgcacaatgtttataatgagtttccgtctt

SEQ ID NO: 19411 - DNA, 80 bp, synthetic construct
  misc_feature 1..80: note = Synthetic: >KX574227_1-cand-40-119
  source 1..80: mol_type = other DNA
tgacgatgatgggtgggctgctgctgttgaagaggcattccccatagaagagttagaagaacctcctgtccaggtcgtgc

SEQ ID NO: 19412 - DNA, 80 bp, synthetic construct
  misc_feature 1..80: note = Synthetic: >KX574227_2-cand-40-119
  source 1..80: mol_type = other DNA
cgcctgttgcaagataagacaggtgacttcatgtccactatactttcatcatgccagtctgctgtacgtaagctccttga

SEQ ID NO: 19413 - DNA, 80 bp, synthetic construct
  misc_feature 1..80: note = Synthetic: >KX574227_3-cand-40-119
  source 1..80: mol_type = other DNA
agttcaatagggctactttacgtcaaatatatgacgtagcacccattgaaattgaaaataaatacactcctttgagtgta

SEQ ID NO: 19414 - DNA, 80 bp, synthetic construct
  misc_feature 1..80: note = Synthetic: >KX574227_4-cand-0-79
  source 1..80: mol_type = other DNA
cccacaatcatgcaatataagcgtcaagtttttacgcgttgtaattacaacctcacactactgctctctcttgtgcaggt

SEQ ID NO: 19415 - DNA, 80 bp, synthetic construct
  misc_feature 1..80: note = Synthetic: >KX574227_4-cand-100-179
  source 1..80: mol_type = other DNA
agattacccctgaggctcttgcaacagggtgttattcgtctcttaccgtcgattggtttgcatttccgtatgcttggaag

SEQ ID NO: 19416 - DNA, 80 bp, synthetic construct
  misc_feature 1..80: note = Synthetic: >KX574227_4-cand-200-279
  source 1..80: mol_type = other DNA
agcagatcgcattgtgcggtttaattataaccaggattatagcaatccctcttgtagaattcactccaaggtgaattctt

SEQ ID NO: 19417 - DNA, 80 bp, synthetic construct
  misc_feature 1..80: note = Synthetic: >KX574227_4-cand-300-379
  source 1..80: mol_type = other DNA
ggtttatatagttatattactaattgtaattacggcggcttcaacaaggatgacgttgttaagcctggtggtcgtgccag

SEQ ID NO: 19418 - DNA, 80 bp, synthetic construct
  misc_feature 1..80: note = Synthetic: >KX574227_4-cand-400-479
  source 1..80: mol_type = other DNA
cactcaattcacctactaacggtcaagtctggtcttttaattttggtggcgtcccttacagaacctcccgcctcacctac

SEQ ID NO: 19419 - DNA, 80 bp, synthetic construct
  misc_feature 1..80: note = Synthetic: >KX574227_5-cand-130-209
  source 1..80: mol_type = other DNA
atttgctgtgataacttacataggtttcaacctattacaagggttaacatggctctccctcttattaaggaatggttgcg

SEQ ID NO: 19420 - DNA, 80 bp, synthetic construct
  misc_feature 1..80: note = Synthetic: >KX574227_5-cand-220-299
  source 1..80: mol_type = other DNA
ttccctatttacaatagccaccttcctctacacatgtctgtttctaagctgcatgctttagatgataatacttgtgagta

SEQ ID NO: 19421 - DNA, 80 bp, synthetic construct
  misc_feature 1..80: note = Synthetic: >KX574227_5-cand-310-389
  source 1..80: mol_type = other DNA
atgtcttgcttcaaacagtatcccacccagatgtttgtgagacctatcgctgttgaattggtttccatacgtcaatcttc

SEQ ID NO: 19422 - DNA, 80 bp, synthetic construct
  misc_feature 1..80: note = Synthetic: >KX574227_5-cand-400-479
  source 1..80: mol_type = other DNA
cgatgcatagttcattcagttcccatattacatgcgccaggattttaacgaactatggctttttctttagccttgttcaa

SEQ ID NO: 19423 - DNA, 80 bp, synthetic construct
  misc_feature 1..80: note = Synthetic: >KX574227_5-cand-490-569
  source 1..80: mol_type = other DNA
ttagtgcctgcatttcctgaagcgcatggtggtgaacctgctcaatttgctaatgttttcacatgcattcctactgtagg

SEQ ID NO: 19424 - DNA, 80 bp, synthetic construct
  misc_feature 1..80: note = Synthetic: >KX574227_5-cand-580-659
  source 1..80: mol_type = other DNA
gcacttacagtgaatgtgtgcattttaccattactactcctcattccacaggacacttgcaggcgtagtattttcaaaac

SEQ ID NO: 19425 - DNA, 80 bp, synthetic construct
  misc_feature 1..80: note = Synthetic: >KX574227_6-cand-0-79
  source 1..80: mol_type = other DNA
aacctattgacatgaataaggcagacggtgtcatctacccaaatggccgcacttattctaacatcacattacagaccact

SEQ ID NO: 19426 - DNA, 80 bp, synthetic construct
  misc_feature 1..80: note = Synthetic: >KX574227_6-cand-90-169
  source 1..80: mol_type = other DNA
ctcgtaatggtgatttaggcactcagtatgtctattcagcatctaatgagaaaagccgcactagcaatgtggcttttatt

SEQ ID NO: 19427 - DNA, 80 bp, synthetic construct
  misc_feature 1..80: note = Synthetic: >KX574227_6-cand-180-259
  source 1..80: mol_type = other DNA
catactatggcaatccctttggcgacggcattgtcatacgtataggtcaaaattctaataagactggtagtgtcattgtg

SEQ ID NO: 19428 - DNA, 80 bp, synthetic construct
  misc_feature 1..80: note = Synthetic: >KX574227_6-cand-270-349
  source 1..80: mol_type = other DNA
agactactattaaaaagatctacccagctcttatgcttggtagttcttttggcaatttctctgttaataataagtcaggt

SEQ ID NO: 19429 - DNA, 80 bp, synthetic construct
  misc_feature 1..80: note = Synthetic: >KX574227_6-cand-370-449
  source 1..80: mol_type = other DNA
tcttatcttacctagcaagtgtggcactgtatttcaggtggcatactgccttctacaaccaaggactgactcttattgtc

SEQ ID NO: 19430 - DNA, 80 bp, synthetic construct
  misc_feature 1..80: note = Synthetic: >KX574227_6-cand-460-539
  source 1..80: mol_type = other DNA
taactatgttagctatgcactcattgattctcctacggattgtacatctgcggatgaatctaaacgtaggaatggtcttg

SEQ ID NO: 19431 - DNA, 80 bp, synthetic construct
  misc_feature 1..80: note = Synthetic: >KX574227_6-cand-550-629
  source 1..80: mol_type = other DNA
aaagtacttcaatttggtcaattgtacctattttgaagagtttaatgtcacagctgacgagcgtgcagagtggtttggca

SEQ ID NO: 19432 - DNA, 80 bp, synthetic construct
  misc_feature 1..80: note = Synthetic: >KX574227_6-cand-600-679
  source 1..80: mol_type = other DNA
cagctgacgagcgtgcagagtggtttggcatcacccaagattctcagggtgtgcacctctacacctctcgtaaaaatggt

SEQ ID NO: 19433 - DNA, 80 bp, synthetic construct
  misc_feature 1..80: note = Synthetic: >KX722529_2-cand-0-79
  source 1..80: mol_type = other DNA
tatactgccaccaactgtacgagagtttgcattcggtagggacggatccgtttttgttaatggttataaatattttagct

SEQ ID NO: 19434 - DNA, 80 bp, synthetic construct
  misc_feature 1..80: note = Synthetic: >KX722529_3-cand-240-319
  source 1..80: mol_type = other DNA
tactaccatgccaaaagcacagctgggtttccaagacatctccgtcttggtaaaagatgaatgcactgattacaacatat

SEQ ID NO: 19435 - DNA, 80 bp, synthetic construct
  misc_feature 1..80: note = Synthetic: >KX722529_4-cand-0-79
  source 1..80: mol_type = other DNA
ctgagactattcttggtggctacttaccatattgtggacggggtgataattgtgggtggtataattttgtttaccagtca

SEQ ID NO: 19436 - DNA, 80 bp, synthetic construct
  misc_feature 1..80: note = Synthetic: >KX722529_4-cand-100-179
  source 1..80: mol_type = other DNA
gtacaaatacataaacacggaataccttataccgaatgttcacggcgtctactttgatgtacgagagtatggcaattcag

SEQ ID NO: 19437 - DNA, 80 bp, synthetic construct
  misc_feature 1..80: note = Synthetic: >KX722529_4-cand-200-279
  source 1..80: mol_type = other DNA
gataaagtcggcttattaatagccatacatggtacctcccactacagtcttctcatggttttacaagaccgggtagagga

SEQ ID NO: 19438 - DNA, 80 bp, synthetic construct
  misc_feature 1..80: note = Synthetic: >KX722530_1-cand-0-79
  source 1..80: mol_type = other DNA
tctatacctaagaatttcactgttgcagtgcaagccgaatacattcagattcaagtcaaacctgttgttgtggattgtgc

SEQ ID NO: 19439 - DNA, 80 bp, synthetic construct
  misc_feature 1..80: note = Synthetic: >KX722530_2-cand-0-79
  source 1..80: mol_type = other DNA
catacttccaccaacagtgcgagaatttgcatttggtagagatggatccatttttgttaatggctataagtattttagtt

SEQ ID NO: 19440 - DNA, 80 bp, synthetic construct
  misc_feature 1..80: note = Synthetic: >KX722530_2-cand-280-359
  source 1..80: mol_type = other DNA
gctagtatgctcgttaaaaaggacctacctaaaacatttgttaccatgccacagttttacaactggatgaacgtcacgtt

SEQ ID NO: 19441 - DNA, 80 bp, synthetic construct
  misc_feature 1..80: note = Synthetic: >KX722530_2-cand-370-449
  source 1..80: mol_type = other DNA
ttaaatgatatagcgaaacaagctgacatcattcttgcgaaagcccctgagctagcatcactcgcagatgtacattttga

SEQ ID NO: 19442 - DNA, 80 bp, synthetic construct
  misc_feature 1..80: note = Synthetic: >KX722530_2-cand-450-529
  source 1..80: mol_type = other DNA
aatagcccaggctaatggcagtgtaactaaggttactagcctatgtgtacaaacaagacagttggcattattctacaagt

SEQ ID NO: 19443 - DNA, 80 bp, synthetic construct
  misc_feature 1..80: note = Synthetic: >KX722530_2-cand-540-619
  source 1..80: mol_type = other DNA
acaaggcttgtacacatattctaacttggtggagcttcaaaattatgactgccccttctcgccacaacagtttaataatt

SEQ ID NO: 19444 - DNA, 80 bp, synthetic construct
  misc_feature 1..80: note = Synthetic: >KX722530_2-cand-620-699
  source 1..80: mol_type = other DNA
atttgcagtttgacactctatgttttgatgtgaacccatcagttgctggttgtaagtggtcgctagttcatgatgtccgg

SEQ ID NO: 19445 - DNA, 80 bp, synthetic construct
  misc_feature 1..80: note = Synthetic: >KX722530_2-cand-710-789
  source 1..80: mol_type = other DNA
agtttgccaccatcacagtttcttataaagaaggtgctatgatcactactatgccaaatgcacagttgggttttcaagat

SEQ ID NO: 19446 - DNA, 80 bp, synthetic construct
  misc_feature 1..80: note = Synthetic: >KX722530_2-cand-810-889
  source 1..80: mol_type = other DNA
taaatgcactgactataacatatatggattccagggcacaggcattattagaaatactacctcaagattagtagcgggcc

SEQ ID NO: 19447 - DNA, 80 bp, synthetic construct
  misc_feature 1..80: note = Synthetic: >KX722530_2-cand-870-949
  source 1..80: mol_type = other DNA
ctcaagattagtagcgggcctttactatacgtctattagtggtgaactactcgcctttaaaaatagtactactggggaaa

SEQ ID NO: 19448 - DNA, 80 bp, synthetic construct
  misc_feature 1..80: note = Synthetic: >KX900409_1-cand-130-209
  source 1..80: mol_type = other DNA
tatgttatatggcctacaatggtctgcagatgcggttgttgcttatttacatggtgccagttaccatattagctttgaaa

SEQ ID NO: 19449 - DNA, 80 bp, synthetic construct
  misc_feature 1..80: note = Synthetic: >KX900411_1-cand-0-79
  source 1..80: mol_type = other DNA
tatgcatttgtaagggttcaccacctactaccaccaccgagtctagtctgacttgcaattggggtagtgagtgcaggttg

SEQ ID NO: 19450 - DNA, 80 bp, synthetic construct
  misc_feature 1..80: note = Synthetic: >KX900411_1-cand-130-209
  source 1..80: mol_type = other DNA
tatgttatatggcttacaatggtctgcagatgcggttgttgcttatttacatggtgccagttaccgtattagttttgaaa

SEQ ID NO: 19451 - DNA, 80 bp, synthetic construct
  misc_feature 1..80: note = Synthetic: >KX964649_1-cand-0-79
  source 1..80: mol_type = other DNA
tgataattctacgcaaacctcctgtgttatgttcgatggtgatcagccactacttgtagatggtgcagttagtaatttta

SEQ ID NO: 19452 - DNA, 80 bp, synthetic construct
  misc_feature 1..80: note = Synthetic: >KX964649_1-cand-120-199
  source 1..80: mol_type = other DNA
aagaggttatgttgtggagtctaatgatgtggaattttccagccatacacgttataattttagtgttagtgtagcttgta

SEQ ID NO: 19453 - DNA, 80 bp, synthetic construct
  misc_feature 1..80: note = Synthetic: >KX964649_1-cand-390-469
  source 1..80: mol_type = other DNA
tcattgtctaggcagtttgcgaggcttcaatgcgcgtaataattttaagagagcgttggatgcttgtcctgatggtagtg

SEQ ID NO: 19454 - DNA, 80 bp, synthetic construct
  misc_feature 1..80: note = Synthetic: >KY073744_1-cand-40-119
  source 1..80: mol_type = other DNA
ctttaaatctgaaggtcttaatgccctttggaataaatttgtaacaggtgatgtagggccttttgtcagttttatttatt

SEQ ID NO: 19455 - DNA, 80 bp, synthetic construct
  misc_feature 1..80: note = Synthetic: >KY073744_2-cand-0-79
  source 1..80: mol_type = other DNA
cacttctcgcaagatgttccaacccaggaatgctgaaattagtgacttcatacaaatttccaattgtgacgttcaatttc

SEQ ID NO: 19456 - DNA, 80 bp, synthetic construct
  misc_feature 1..80: note = Synthetic: >KY073744_2-cand-90-169
  source 1..80: mol_type = other DNA
acaagatcaagttcaagatgtcatacctgagtatgttgacgtcaataaaactttggaagaagctttatctaagttgccta

SEQ ID NO: 19457 - DNA, 80 bp, synthetic construct
  misc_feature 1..80: note = Synthetic: >KY073744_3-cand-0-79
  source 1..80: mol_type = other DNA
ggtgtgaaggcaatttctctttctttgatgctagtgtagagtcattgagtggtgacacttacttgctttttaccaactca

SEQ ID NO: 19458 - DNA, 80 bp, synthetic construct
  misc_feature 1..80: note = Synthetic: >KY073744_3-cand-70-149
  source 1..80: mol_type = other DNA
taccaactcaattttgatgttggataagcaaggtcaattgttggacaccaagcttaatggtattttacaacaggccgctt

SEQ ID NO: 19459 - DNA, 80 bp, synthetic construct
  misc_feature 1..80: note = Synthetic: >KY073744_3-cand-220-299
  source 1..80: mol_type = other DNA
catttacatgtgcgttgttccatctgctaaagatccttcttttgataaaaaccttgaccgttgtgttcgtaagcttaata

SEQ ID NO: 19460 - DNA, 80 bp, synthetic construct
  misc_feature 1..80: note = Synthetic: >KY073744_4-cand-0-79
  source 1..80: mol_type = other DNA
aactgaacctaccaacttgggcaaccgcaaacgcaatcaaaagccaattcaacctgagtttgacatccagctccctaacg

SEQ ID NO: 19461 - DNA, 80 bp, synthetic construct
  misc_feature 1..80: note = Synthetic: >KY073744_4-cand-110-189
  source 1..80: mol_type = other DNA
ctaatagttcctcaagagctagcagtagggcttcttcaaggggtaactctcgtgaaacctcaaggtcaaactcaagacag

SEQ ID NO: 19462 - DNA, 80 bp, synthetic construct
  misc_feature 1..80: note = Synthetic: >KY073744_5-cand-0-79
  source 1..80: mol_type = other DNA
tttcggtcccgttgttaaaagcgcacctgtacctgaacatccgttcgctttcccatttagggatgaacttggtgttcgtg

SEQ ID NO: 19463 - DNA, 80 bp, synthetic construct
  misc_feature 1..80: note = Synthetic: >KY073744_5-cand-100-179
  source 1..80: mol_type = other DNA
aactgttggatcaataccacgcttatacagttgcaactcaccaaactcctagaggagtctgtcgagatggagctttttag

SEQ ID NO: 19464 - DNA, 80 bp, synthetic construct
  misc_feature 1..80: note = Synthetic: >KY073744_5-cand-320-399
  source 1..80: mol_type = other DNA
gtggttgtggtaagaggcgtgatgagcaagccggctgctggttttggataatgccgtacacaaaaccattcccttatggt

SEQ ID NO: 19465 - DNA, 80 bp, synthetic construct
  misc_feature 1..80: note = Synthetic: >KY073744_6-cand-0-79
  source 1..80: mol_type = other DNA
ttgcactctttaaacctctttctaatagaggcagagtgttgtgctttgctgcaaagttgttggtgttgttcttatatgtg

SEQ ID NO: 19466 - DNA, 80 bp, synthetic construct
  misc_feature 1..80: note = Synthetic: >KY073744_6-cand-110-189
  source 1..80: mol_type = other DNA
gatggcgccatcatttgcgttgcattgctttctagattctttcatgttggttattatgcctacctatataaaaatttctc

SEQ ID NO: 19467 - DNA, 80 bp, synthetic construct
  misc_feature 1..80: note = Synthetic: >KY073744_6-cand-350-429
  source 1..80: mol_type = other DNA
tacatggccatccgaggttctttggaaaagaatcttcaattgatgcgtaaagtcgagctttataacggtgacgctatata

SEQ ID NO: 19468 - DNA, 80 bp, synthetic construct
  misc_feature 1..80: note = Synthetic: >KY073744_7-cand-120-199
  source 1..80: mol_type = other DNA
ggtttatgtttatttctgtgctgttaatcctcactgttgttgcagttgcattagccaaagaatccactttacatttggtg

SEQ ID NO: 19469 - DNA, 80 bp, synthetic construct
  misc_feature 1..80: note = Synthetic: >KY073744_7-cand-220-299
  source 1..80: mol_type = other DNA
tttgctgtttctttagctattctaatttatttggcatttgctaagtcctgtgaagattgtgtagtttatcagttctaatg

SEQ ID NO: 19470 - DNA, 80 bp, synthetic construct
  misc_feature 1..80: note = Synthetic: >KY073744_7-cand-320-399
  source 1..80: mol_type = other DNA
gtttgccatcctaatcacctttttcgttgtcattgtttactatattgccatacaagatcaaattctggaagaagcccagc

SEQ ID NO: 19471 - DNA, 80 bp, synthetic construct
  misc_feature 1..80: note = Synthetic: >KY073744_7-cand-420-499
  source 1..80: mol_type = other DNA
cagtgtcgtacattggcttctagtaaagttcaaaacctaactggtttttgacaatggattttatgctgtttctttatgcg

SEQ ID NO: 19472 - DNA, 80 bp, synthetic construct
  misc_feature 1..80: note = Synthetic: >KY073744_7-cand-520-599
  source 1..80: mol_type = other DNA
agggttacctgtagctatagctttaggtgtttgggctgctgaagttactggcttggtttattttctctatgtggatggac

SEQ ID NO: 19473 - DNA, 80 bp, synthetic construct
  misc_feature 1..80: note = Synthetic: >KY073744_8-cand-130-209
  source 1..80: mol_type = other DNA
atgccgcttcagatgttgaagctattgctgctgtcgagcttttgttgtcagattttaaaaatgcagtctttgtttacaat

SEQ ID NO: 19474 - DNA, 80 bp, synthetic construct
  misc_feature 1..80: note = Synthetic: >KY073744_8-cand-220-299
  source 1..80: mol_type = other DNA
atggttgtaacatcattgttaagcgtgatgttgcttttgccacacctttattgtttaaagattgttatagtgtctgggag

SEQ ID NO: 19475 - DNA, 80 bp, synthetic construct
  misc_feature 1..80: note = Synthetic: >KY073744_8-cand-310-389
  source 1..80: mol_type = other DNA
ttgattattgtggtcagccatggtttttggttgactacaattctatcttacaaggtacttctctctctgacattgttgtg

SEQ ID NO: 19476 - DNA, 80 bp, synthetic construct
  misc_feature 1..80: note = Synthetic: >KY073744_8-cand-400-479
  source 1..80: mol_type = other DNA
agtctaaagctttgctggaacatctaaatcctaaatgccccgatgtgttacttaacattgatggcggtcgtctttggaag

SEQ ID NO: 19477 - DNA, 80 bp, synthetic construct
  misc_feature 1..80: note = Synthetic: >KY073744_8-cand-490-569
  source 1..80: mol_type = other DNA
aaaaacttgactctgttgttgaatggcttaaaacccttaagcttacactcacccctaaaggtcttttgggtaattgtgca

SEQ ID NO: 19478 - DNA, 80 bp, synthetic construct
  misc_feature 1..80: note = Synthetic: >KY073744_8-cand-580-659
  source 1..80: mol_type = other DNA
aaaggattttggccaaactgcttgacatatacaatggtttcttagaaactgtttgtagtgttgtacatactgctggtgtt

SEQ ID NO: 19479 - DNA, 80 bp, synthetic construct
  misc_feature 1..80: note = Synthetic: >KY073744_8-cand-670-749
  source 1..80: mol_type = other DNA
attatgctgttgatgttccttatgttgttattggtgactttgttagccgcgttgtttgtaagaagagggctgatgttcct

SEQ ID NO: 19480 - DNA, 80 bp, synthetic construct
  misc_feature 1..80: note = Synthetic: >KY073744_8-cand-760-839
  source 1..80: mol_type = other DNA
acagtcgcatcacttcttttcatgaatttgttgacgctgtttacaaagtaggtaaaccaacgacaatcgatgttgaacac

SEQ ID NO: 19481 - DNA, 80 bp, synthetic construct
  misc_feature 1..80: note = Synthetic: >KY073744_8-cand-980-1059
  source 1..80: mol_type = other DNA
atctgctggtggcaaaatatcctttgctgaagaggttacagttcacgatgttgaaccaacacacaaagtgaaactcgttt

SEQ ID NO: 19482 - DNA, 80 bp, synthetic construct
  misc_feature 1..80: note = Synthetic: >KY073744_9-cand-0-79
  source 1..80: mol_type = other DNA
gatagtaactctgctggtggcaggtattatgccaatattactaatgctcatggtgtttttgttggttacttcactggtga

SEQ ID NO: 19483 - DNA, 80 bp, synthetic construct
  misc_feature 1..80: note = Synthetic: >KY073744_9-cand-80-159
  source 1..80: mol_type = other DNA
ccgggctagtgcgtttggtctgggttcttctaagtttgaccctaatatttaccaaatgtattttggtcaccgtaatcaac

SEQ ID NO: 19484 - DNA, 80 bp, synthetic construct
  misc_feature 1..80: note = Synthetic: >KY073744_9-cand-140-219
  source 1..80: mol_type = other DNA
ttttggtcaccgtaatcaacataactcctttcgtgtacgcatttgcaaatggccttccgtccaagtcccgaccttaccac

SEQ ID NO: 19485 - DNA, 80 bp, synthetic construct
  misc_feature 1..80: note = Synthetic: >KY073744_9-cand-220-299
  source 1..80: mol_type = other DNA
gtgaccctcctgttgcacctaaagactgtcttgttgacaaacaatttcagtatcaatttgcacataaaggtcataaaatt

SEQ ID NO: 19486 - DNA, 80 bp, synthetic construct
  misc_feature 1..80: note = Synthetic: >KY073744_9-cand-300-379
  source 1..80: mol_type = other DNA
tatggtgtcactttttctggtgatagagtgcgtattcactccactgttggtgttcataatttttatgtacctggtgcttc

SEQ ID NO: 19487 - DNA, 80 bp, synthetic construct
  misc_feature 1..80: note = Synthetic: >KY073744_9-cand-380-459
  source 1..80: mol_type = other DNA
taattgggatactgttgctattgcatgtgataacccaacatcttgctatcatagtgttgtcacacaacttgctactgtac

SEQ ID NO: 19488 - DNA, 80 bp, synthetic construct
  misc_feature 1..80: note = Synthetic: >KY073744_9-cand-460-539
  source 1..80: mol_type = other DNA
gtgtgcaaactgatgacaagggtttaatctcatcatttgaaccttgtcagaattgtgagggttttgctgagaatgtcttt

SEQ ID NO: 19489 - DNA, 80 bp, synthetic construct
  misc_feature 1..80: note = Synthetic: >KY073744_9-cand-540-619
  source 1..80: mol_type = other DNA
gctgttgaggctagtggcaaaataccgtcagacttttctttcaacaactggtttcttcttactaactcgtcttctgtcgt

SEQ ID NO: 19490 - DNA, 80 bp, synthetic construct
  misc_feature 1..80: note = Synthetic: >KY073744_9-cand-620-699
  source 1..80: mol_type = other DNA
tgatggcaaagtaagatctttacaacctttgaaagttctgtgtcttcgtgctgttcctagcctactctccactaaagaag

SEQ ID NO: 19491 - DNA, 80 bp, synthetic construct
  misc_feature 1..80: note = Synthetic: >KY073744_9-cand-700-779
  source 1..80: mol_type = other DNA
ttatttctttaagtggtgttaatgctgacaagtgtaacggtcattctatcaatgaaacagcgggtgcattgagattcaac

SEQ ID NO: 19492 - DNA, 80 bp, synthetic construct
  misc_feature 1..80: note = Synthetic: >KY073744_9-cand-780-859
  source 1..80: mol_type = other DNA
ctcaatttcacttccaacccaataaatgcgcttgcttcaggaaaaattttcattagtagcagtttcggaaacgttactat

SEQ ID NO: 19493 - DNA, 80 bp, synthetic construct
  misc_feature 1..80: note = Synthetic: >KY073744_9-cand-860-939
  source 1..80: mol_type = other DNA
attttgtagtaactcttctgatccaggctctagtgctgacgcattcattgctatgggttctacctctgccgctgtttatt

SEQ ID NO: 19494 - DNA, 80 bp, synthetic construct
  misc_feature 1..80: note = Synthetic: >KY073744_9-cand-940-1019
  source 1..80: mol_type = other DNA
gctttgccaattccactttcggtaatgtgacatcacttgatttcatcggcgttttaccagtcactgttagagaatttgtg

SEQ ID NO: 19495 - DNA, 80 bp, synthetic construct
  misc_feature 1..80: note = Synthetic: >KY073744_9-cand-1020-1099
  source 1..80: mol_type = other DNA
tttgctgccactggccagatttacattaatgggtttaattattttagcctacctgacattttgtctgttgactttgatgt

SEQ ID NO: 19496 - DNA, 80 bp, synthetic construct
  misc_feature 1..80: note = Synthetic: >KY073744_9-cand-1110-1189
  source 1..80: mol_type = other DNA
aatgttactgacttttggactgtcgcttacacacaatttgttgacactctagtggctgttaataacactctcatacagga

SEQ ID NO: 19497 - DNA, 80 bp, synthetic construct
  misc_feature 1..80: note = Synthetic: >KY073744_9-cand-1200-1279
  source 1..80: mol_type = other DNA
tgtgacgatgttattcacaaacttaagtgttctcaattgtcttttgatctccctgatggtttttattcagccagtcttgt

SEQ ID NO: 19498 - DNA, 80 bp, synthetic construct
  misc_feature 1..80: note = Synthetic: >KY073744_9-cand-1280-1359
  source 1..80: mol_type = other DNA
tcgagatgagagacttgacaaaacttttgtcactttacctactcactctgaccattctaatgtgacactctatgttagtt

SEQ ID NO: 19499 - DNA, 80 bp, synthetic construct
  misc_feature 1..80: note = Synthetic: >KY073744_9-cand-1360-1439
  source 1..80: mol_type = other DNA
tcaacacgtattcttctagtacttgtactactaaacctgatcatgttactagttgccagtacaatgtcactattgttgga

SEQ ID NO: 19500 - DNA, 80 bp, synthetic construct
  misc_feature 1..80: note = Synthetic: >KY073744_9-cand-1440-1519
  source 1..80: mol_type = other DNA
gaaaatgacggacctgtttgtgttaaatccaaacagttcactcctttgctccaaacatcgattcctactggctattatgt

SEQ ID NO: 19501 - DNA, 80 bp, synthetic construct
  misc_feature 1..80: note = Synthetic: >KY073744_9-cand-1520-1599
  source 1..80: mol_type = other DNA
tagtgttgaaagtggctcttgcccctttaactttttgaagttgaagaattatctaacttttgactcattgtgtttttcaa

SEQ ID NO: 19502 - DNA, 80 bp, synthetic construct
  misc_feature 1..80: note = Synthetic: >KY073744_9-cand-1600-1679
  source 1..80: mol_type = other DNA
caaaacaactgcctggcggttgttccatgttgattaaacgtagtaatgtcaattataattctgatattggggttatttat

SEQ ID NO: 19503 - DNA, 80 bp, synthetic construct
  misc_feature 1..80: note = Synthetic: >KY073744_9-cand-1680-1759
  source 1..80: mol_type = other DNA
gtttcacattcacctggcaacaatattttgggtgtgccgcaagctagtacaggtgttaaagatctttcttacattgtcac

SEQ ID NO: 19504 - DNA, 80 bp, synthetic construct
  misc_feature 1..80: note = Synthetic: >KY073744_9-cand-1760-1839
  source 1..80: mol_type = other DNA
cgatgtttgcactgattacacaatttatggtaaatctggcaaaggtgtgattcgtaagactaattcttcgctgccagctg

SEQ ID NO: 19505 - DNA, 80 bp, synthetic construct
  misc_feature 1..80: note = Synthetic: >KY073744_9-cand-1840-1919
  source 1..80: mol_type = other DNA
gtattatgtacacttctgaatctgggtcgttgctcggtttcaagaatgtcactgattccactgtttacactgttactcct

SEQ ID NO: 19506 - DNA, 80 bp, synthetic construct
  misc_feature 1..80: note = Synthetic: >KY073744_9-cand-1930-2009
  source 1..80: mol_type = other DNA
ctacccaattggctgtatacaaacaaaaggttcttggtgccattacggctgttaagaatgactcttttggtttcaatagc

SEQ ID NO: 19507 - DNA, 80 bp, synthetic construct
  misc_feature 1..80: note = Synthetic: >KY073745_1-cand-40-119
  source 1..80: mol_type = other DNA
tgaagactttgtgcgaataaatgactgtaatgttacgttccttaacataacagctgatactttgcccgaagtcttccccg

SEQ ID NO: 19508 - DNA, 80 bp, synthetic construct
  misc_feature 1..80: note = Synthetic: >KY073745_10-cand-0-79
  source 1..80: mol_type = other DNA
gagaaaccaacaacccattgttcccacttttgatgtcaaaatcccttcaaacatcaccattgttgaggaccatgatcggt

SEQ ID NO: 19509 - DNA, 80 bp, synthetic construct
  misc_feature 1..80: note = Synthetic: >KY073745_10-cand-180-259
  source 1..80: mol_type = other DNA
atctaggtccaactcacgtggtcgatccggaaatcccacatccccggacgatcttgttgctgctgtgcgagctgctctgg

SEQ ID NO: 19510 - DNA, 80 bp, synthetic construct
  misc_feature 1..80: note = Synthetic: >KY073745_10-cand-270-349
  source 1..80: mol_type = other DNA
cttcgaacccatcaagaacggtcaaagtggaaagaacactccaaagagtggtaatgccacacccaaaaagcagaaatccc

SEQ ID NO: 19511 - DNA, 80 bp, synthetic construct
  misc_feature 1..80: note = Synthetic: >KY073745_10-cand-430-509
  source 1..80: mol_type = other DNA
gaagaagatgtcgtgaagtgcttcggccctcgcgatttcgaccacaactttggtgactctgagattgttcgtctcggagt

SEQ ID NO: 19512 - DNA, 80 bp, synthetic construct
  misc_feature 1..80: note = Synthetic: >KY073745_10-cand-510-589
  source 1..80: mol_type = other DNA
tgaagcgccacactatccacagcttgccgaacttgtgccctcacaggctgctttgctgtttgatagtaacatttccacca

SEQ ID NO: 19513 - DNA, 80 bp, synthetic construct
  misc_feature 1..80: note = Synthetic: >KY073745_10-cand-680-759
  source 1..80: mol_type = other DNA
ttaatgctttcgctgatggcgacaaagttccagccctgccgccaaaagtgaaacgccaaaagtccaagactgaaaagaaa

SEQ ID NO: 19514 - DNA, 80 bp, synthetic construct
  misc_feature 1..80: note = Synthetic: >KY073745_10-cand-760-839
  source 1..80: mol_type = other DNA
gatgacgtcctggatggtctgaatattgctgcccctgcttttgagccaaaagaacagcgcgaatcgcgcccactcaagtt

SEQ ID NO: 19515 - DNA, 80 bp, synthetic construct
  misc_feature 1..80: note = Synthetic: >KY073745_10-cand-920-999
  source 1..80: mol_type = other DNA
ctgcttaaacagttcaactaaacacatgttatttttcttgctttgcaaggaatccactctgcaccttgtgttaacaattc

SEQ ID NO: 19516 - DNA, 80 bp, synthetic construct
  misc_feature 1..80: note = Synthetic: >KY073745_10-cand-1000-1079
  source 1..80: mol_type = other DNA
tttttctttgcattgttgtttctcaatgtatgcaaatctttgcaaagacactgtagtgtactactactgtattttggtcc

SEQ ID NO: 19517 - DNA, 80 bp, synthetic construct
  misc_feature 1..80: note = Synthetic: >KY073745_10-cand-1280-1359
  source 1..80: mol_type = other DNA
caaccttgtctctgttgatctatttggtaatagtcaactaaccaataacccacatggaccctttttgcattgtgcttacg

SEQ ID NO: 19518 - DNA, 80 bp, synthetic construct
  misc_feature 1..80: note = Synthetic: >KY073745_10-cand-1600-1679
  source 1..80: mol_type = other DNA
tctgaatttgtcaatgtagttcttgctgtaggcctctttggtctaaatgctatctttaccattaatttctttttggtttg

SEQ ID NO: 19519 - DNA, 80 bp, synthetic construct
  misc_feature 1..80: note = Synthetic: >KY073745_11-cand-240-319
  source 1..80: mol_type = other DNA
accatggttcgtccgcaaactttcgggtcttgtggatgttgcctggaacaaatttgtgactgcactcaaaaacttgcctg

SEQ ID NO: 19520 - DNA, 80 bp, synthetic construct
  misc_feature 1..80: note = Synthetic: >KY073745_11-cand-400-479
  source 1..80: mol_type = other DNA
gttgctgatgtgccttctatgtttgccgatgcctttgagctgcttaaatctgctgttagtaccattttcgacgcagcgtc

SEQ ID NO: 19521 - DNA, 80 bp, synthetic construct
  misc_feature 1..80: note = Synthetic: >KY073745_11-cand-960-1039
  source 1..80: mol_type = other DNA
ctttgttgtttctgtggagaagggtgaaattgctgtaaagcgtgagtacatgctttgcacgcccttttacatgaaacctg

SEQ ID NO: 19522 - DNA, 80 bp, synthetic construct
  misc_feature 1..80: note = Synthetic: >KY073745_11-cand-1280-1359
  source 1..80: mol_type = other DNA
ctgcccagtttactcttacccccgacggtttgctgggtagttgtgctaagaggttccgtcagtttatggatttacttctt

SEQ ID NO: 19523 - DNA, 80 bp, synthetic construct
  misc_feature 1..80: note = Synthetic: >KY073745_11-cand-1520-1599
  source 1..80: mol_type = other DNA
gccgtgttggcgagttttgggcattcattgatgccacttatgctattgacaacccaaaggttgctgatgttgaacccctg

SEQ ID NO: 19524 - DNA, 80 bp, synthetic construct
  misc_feature 1..80: note = Synthetic: >KY073745_11-cand-1680-1759
  source 1..80: mol_type = other DNA
agatgacctttattatcctgctggtctgagtggtgtcttgccaaaagcttttactaaaaatgctggtggaaagataacat

SEQ ID NO: 19525 - DNA, 80 bp, synthetic construct
  misc_feature 1..80: note = Synthetic: >KY073745_11-cand-1760-1839
  source 1..80: mol_type = other DNA
tctcagatgaggtcgtggtacatgacattgaaccaacacacaaggtcaagctcatctatgagtttgaggacgataaaatt

SEQ ID NO: 19526 - DNA, 80 bp, synthetic construct
  misc_feature 1..80: note = Synthetic: >KY073745_11-cand-1840-1919
  source 1..80: mol_type = other DNA
gccgacatctgtaaaaagactatcggcaagcgtatcgttcacactggtgattgggacgcattgtgtaacacgcttcgcac

SEQ ID NO: 19527 - DNA, 80 bp, synthetic construct
  misc_feature 1..80: note = Synthetic: >KY073745_11-cand-1920-1999
  source 1..80: mol_type = other DNA
agctttggatgttttgtctaagcatgttaagttaccagagtgtttcatttatgatgaagaagggggtaatgattacacca

SEQ ID NO: 19528 - DNA, 80 bp, synthetic construct
  misc_feature 1..80: note = Synthetic: >KY073745_11-cand-2000-2079
  source 1..80: mol_type = other DNA
aacctgtcatgatttctcagtggcctgctgctgcttctagtgatgatgagagtgtcgaagacgtgtgtgaggaccccgtc

SEQ ID NO: 19529 - DNA, 80 bp, synthetic construct
  misc_feature 1..80: note = Synthetic: >KY073745_11-cand-2080-2159
  source 1..80: mol_type = other DNA
gacgattcggcagatgttgatgaatcgatgaaaggtgagccacagattcaagaccctgaacctgagatcatcattgacga

SEQ ID NO: 19530 - DNA, 80 bp, synthetic construct
  misc_feature 1..80: note = Synthetic: >KY073745_11-cand-2320-2399
  source 1..80: mol_type = other DNA
cttactggtttgttgtctgatgaaccagcagtgcagttgtttaaggcaggtcgtgttgcaccacttgttaaacaatgcta

SEQ ID NO: 19531 - DNA, 80 bp, synthetic construct
  misc_feature 1..80: note = Synthetic: >KY073745_2-cand-0-79
  source 1..80: mol_type = other DNA
atcagcaaattcttgctgattctttcaacaaggctattggcggtatcactgatgctttgaccaatgttaacgatgctttg

SEQ ID NO: 19532 - DNA, 80 bp, synthetic construct
  misc_feature 1..80: note = Synthetic: >KY073745_2-cand-130-209
  source 1..80: mol_type = other DNA
tgagagtgttgtcaatgagcaaggccttgcactttctcatttgaccaaacaacttaaaaacaattttcaggccatctcct

SEQ ID NO: 19533 - DNA, 80 bp, synthetic construct
  misc_feature 1..80: note = Synthetic: >KY073745_3-cand-270-349
  source 1..80: mol_type = other DNA
gctgtgctctacacctacttttatagtggtgaagtccttagcttgttgatcatgtttctctgtgctgttactaacgagtg

SEQ ID NO: 19534 - DNA, 80 bp, synthetic construct
  misc_feature 1..80: note = Synthetic: >KY073745_4-cand-170-249
  source 1..80: mol_type = other DNA
gcttccctgcgtgtttgtaggtggaactctgtctttaatttaactaatagtgcctcacttgttctgtctgacgattgttt

SEQ ID NO: 19535 - DNA, 80 bp, synthetic construct
  misc_feature 1..80: note = Synthetic: >KY073745_4-cand-300-379
  source 1..80: mol_type = other DNA
ttagttggtcagggtcacgtgtacgttactatggtgaagatggtacttacacattttatgttcccaattcttgggacaca

SEQ ID NO: 19536 - DNA, 80 bp, synthetic construct
  misc_feature 1..80: note = Synthetic: >KY073745_5-cand-220-299
  source 1..80: mol_type = other DNA
acccgccggtagctgggagtttaagaactacttcgaggatggcaacgagatcaccttgaatggtgtcgtttactacctcg

SEQ ID NO: 19537 - DNA, 80 bp, synthetic construct
  misc_feature 1..80: note = Synthetic: >KY073745_6-cand-120-199
  source 1..80: mol_type = other DNA
tgtcgacgctgtgcttattgcggtcaccattttggctcgcctgttgtatactggctattatgcctatgtgtataaaaatt

SEQ ID NO: 19538 - DNA, 80 bp, synthetic construct
  misc_feature 1..80: note = Synthetic: >KY073745_6-cand-330-409
  source 1..80: mol_type = other DNA
tcacaccgtcgcatttgcttctgctaacgaactctatgttgctatcagaggaagtgtggaaaaagatcttaagctaatgc

SEQ ID NO: 19539 - DNA, 80 bp, synthetic construct
  misc_feature 1..80: note = Synthetic: >KY073745_6-cand-440-519
  source 1..80: mol_type = other DNA
tttttgtttttgccgaggagcccgttgtgggtattgtgaacgttagttgcgatgttcaactatacgaagatgttcccaca

SEQ ID NO: 19540 - DNA, 80 bp, synthetic construct
  misc_feature 1..80: note = Synthetic: >KY073745_7-cand-340-419
  source 1..80: mol_type = other DNA
tggctacactgctcataatgttacacagagtgttgttgtgaaaccagaacctacggttatggaacgtattgacaaaggtg

SEQ ID NO: 19541 - DNA, 80 bp, synthetic construct
  misc_feature 1..80: note = Synthetic: >KY073745_8-cand-630-709
  source 1..80: mol_type = other DNA
gttgtgcacataagctcaataggctaaagctcagctttgtcactaacttaccaccttcttatgcgcttagaggcctgttg

SEQ ID NO: 19542 - DNA, 80 bp, synthetic construct
  misc_feature 1..80: note = Synthetic: >KY073745_8-cand-810-889
  source 1..80: mol_type = other DNA
gtgtcaacgtcaaggatgttgtcgttgacacttcacaatcttaccagtctcagattggtgttgtttcggacggcaaagat

SEQ ID NO: 19543 - DNA, 80 bp, synthetic construct
  misc_feature 1..80: note = Synthetic: >KY073745_9-cand-0-79
  source 1..80: mol_type = other DNA
ttttagtcttaacttcactgaagacccagctgctgctttagctacgggttctatcattgtgtatactgttgccggcaata

SEQ ID NO: 19544 - DNA, 80 bp, synthetic construct
  misc_feature 1..80: note = Synthetic: >KY073745_9-cand-80-159
  source 1..80: mol_type = other DNA
caacaatatattgcagcaatagttctgactcttctacgtatggcattccctttggcgccacagcttttgccatgtattgc

SEQ ID NO: 19545 - DNA, 80 bp, synthetic construct
  misc_feature 1..80: note = Synthetic: >KY073745_9-cand-160-239
  source 1..80: mol_type = other DNA
ttcgccaacacttctacgattaatgccactaattcctattttcttggtgtgttgcccccaaatttgcgtgaaattgtttt

SEQ ID NO: 19546 - DNA, 80 bp, synthetic construct
  misc_feature 1..80: note = Synthetic: >KY073745_9-cand-230-309
  source 1..80: mol_type = other DNA
aaattgttttcgccgcctcagggcaagtttacatcaatgggtttaattactttactttgccccaaattgttggtgtggca

SEQ ID NO: 19547 - DNA, 80 bp, synthetic construct
  misc_feature 1..80: note = Synthetic: >KY073745_9-cand-310-389
  source 1..80: mol_type = other DNA
tttaacctcacgtctgacactcctgttgatttttggactgttgcttttactacgttcaccgatgtgttggttagtgtaaa

SEQ ID NO: 19548 - DNA, 80 bp, synthetic construct
  misc_feature 1..80: note = Synthetic: >KY073745_9-cand-390-469
  source 1..80: mol_type = other DNA
tctcacccaaattcaacaagttgtgtactgtgatggtgttgttaacaggcttaaatgttcccaaatggtttttgaattgc

SEQ ID NO: 19549 - DNA, 80 bp, synthetic construct
  misc_feature 1..80: note = Synthetic: >KY073745_9-cand-470-549
  source 1..80: mol_type = other DNA
ctgacggtttttattcagcagctgatgtttctgacactgttttacctcgttctgttgtaacactcccaactcattttgac

SEQ ID NO: 19550 - DNA, 80 bp, synthetic construct
  misc_feature 1..80: note = Synthetic: >KY073745_9-cand-550-629
  source 1..80: mol_type = other DNA
cactctaacgtcactattgatgtcacgtttcggtctggccaacagtgtgctacaacttcccaaccacacatttccatcac

SEQ ID NO: 19551 - DNA, 80 bp, synthetic construct
  misc_feature 1..80: note = Synthetic: >KY073745_9-cand-630-709
  source 1..80: mol_type = other DNA
agccccaccgtgcagtgtcaacattaccatagttgacgctgtggatggcgcattttgtgtctcaaccaaacaattcaccc

SEQ ID NO: 19552 - DNA, 80 bp, synthetic construct
  misc_feature 1..80: note = Synthetic: >KY073745_9-cand-710-789
  source 1..80: mol_type = other DNA
ctctgttgaatgcgcatgatttgccaacatctaatggtcataccttcaaagtttatttggagtctggtgactgtcctttt

SEQ ID NO: 19553 - DNA, 80 bp, synthetic construct
  misc_feature 1..80: note = Synthetic: >KY073745_9-cand-790-869
  source 1..80: mol_type = other DNA
tcctttcttaagttggctaattatgtttcatttggtacgttttgtttggctgataagcaacttccgggtggttgtgctat

SEQ ID NO: 19554 - DNA, 80 bp, synthetic construct
  misc_feature 1..80: note = Synthetic: >KY073745_9-cand-870-949
  source 1..80: mol_type = other DNA
ctctgttgtgtctgagttgcttggttataaacgtgtwataggtgctgtttatgtttcctatacccatggtgatgctataa

SEQ ID NO: 19555 - DNA, 80 bp, synthetic construct
  misc_feature 1..80: note = Synthetic: >KY073745_9-cand-950-1029
  source 1..80: mol_type = other DNA
tcggagttcctgaaggtgttgttggtgtgcgtgaattgtcgtctgttgtctttgacgtgtgcacatcttacaacatcttt

SEQ ID NO: 19556 - DNA, 80 bp, synthetic construct
  misc_feature 1..80: note = Synthetic: >KY073745_9-cand-1030-1109
  source 1..80: mol_type = other DNA
gggcgtgtgggtactggtatcattagactttctaatgactcttttataactggtattttgtatacttccgattctggtca

SEQ ID NO: 19557 - DNA, 80 bp, synthetic construct
  misc_feature 1..80: note = Synthetic: >KY073745_9-cand-1110-1189
  source 1..80: mol_type = other DNA
attgcttggttataagaatgtcactacttctgaggtttactcagttactccttgtcacacaccagcacagcttgctgttt

SEQ ID NO: 19558 - DNA, 80 bp, synthetic construct
  misc_feature 1..80: note = Synthetic: >KY073745_9-cand-1190-1269
  source 1..80: mol_type = other DNA
accgtcaacgggttgttgcagctatttcttctgacaatcgaacttatggttttaataacaccatagcaacacctatgttt

SEQ ID NO: 19559 - DNA, 80 bp, synthetic construct
  misc_feature 1..80: note = Synthetic: >KY073745_9-cand-1270-1349
  source 1..80: mol_type = other DNA
tactaccactccgatggtgttaacaattgcacggaacccgtgttagtttactctagcattggtgtctgtgctgatggtgc

SEQ ID NO: 19560 - DNA, 80 bp, synthetic construct
  misc_feature 1..80: note = Synthetic: >KY073745_9-cand-1350-1429
  source 1..80: mol_type = other DNA
catgactgttgttaagaaggttgatgtctcacctcaagttgttgcacctattgccactgcaaacatttctataccaacca

SEQ ID NO: 19561 - DNA, 80 bp, synthetic construct
  misc_feature 1..80: note = Synthetic: >KY073745_9-cand-1430-1509
  source 1..80: mol_type = other DNA
actttaccacctcagtccaggttgagtatttgcaaataagtctcaaaccggtggttgttgactgtaacacttatgtttgc

SEQ ID NO: 19562 - DNA, 80 bp, synthetic construct
  misc_feature 1..80: note = Synthetic: >KY073745_9-cand-1510-1589
  source 1..80: mol_type = other DNA
aacggtaatcctaagtgccttaagcttttgtctgagtacgctactgcatgtaagactgcggaagaggccttgcagcttag

SEQ ID NO: 19563 - DNA, 80 bp, synthetic construct
  misc_feature 1..80: note = Synthetic: >KY073745_9-cand-1600-1679
  source 1..80: mol_type = other DNA
gaggcctctgaagttaattcagctatcacttattctgaagagtcgtatcgtttggctgagaatataaccaatgatgtttt

SEQ ID NO: 19564 - DNA, 80 bp, synthetic construct
  misc_feature 1..80: note = Synthetic: >KY073746_1-cand-40-119
  source 1..80: mol_type = other DNA
tttgacaggttttgtcaaacataagatgttgtttttgcaagctttcctcttgccagttgttatggcaatggctatttaca

SEQ ID NO: 19565 - DNA, 80 bp, synthetic construct
  misc_feature 1..80: note = Synthetic: >KY073746_10-cand-0-79
  source 1..80: mol_type = other DNA
caaacttgaacccgttaaaaaggtgagtgctatcccattttacttgcttatgagtttgtttgtcgtttactttgcactct

SEQ ID NO: 19566 - DNA, 80 bp, synthetic construct
  misc_feature 1..80: note = Synthetic: >KY073746_10-cand-90-169
  source 1..80: mol_type = other DNA
gtctcctaggtctagagtgttgattttggctgctaaagtgcttattgtgttaatttacgtacctatactcatgtggtttg

SEQ ID NO: 19567 - DNA, 80 bp, synthetic construct
  misc_feature 1..80: note = Synthetic: >KY073746_10-cand-140-219
  source 1..80: mol_type = other DNA
taatttacgtacctatactcatgtggtttggtgcgtattttgatgctgtacttattgcagtcaccattctggctcgcttg

SEQ ID NO: 19568 - DNA, 80 bp, synthetic construct
  misc_feature 1..80: note = Synthetic: >KY073746_10-cand-390-469
  source 1..80: mol_type = other DNA
caccgtcgcatttgcttctgataacgagctttatgtcgctatcagaggaagtgtggaaaaagatcttaagcttatgcgta

SEQ ID NO: 19569 - DNA, 80 bp, synthetic construct
  misc_feature 1..80: note = Synthetic: >KY073746_10-cand-480-559
  source 1..80: mol_type = other DNA
gtacaatggcaatgctctttatgtttttgccgaggagcctgttgtgggcatcgtcaacactagttgtgacattcaactat

SEQ ID NO: 19570 - DNA, 80 bp, synthetic construct; identical to SEQ ID NO: 17342
  misc_feature 1..80: note = Synthetic: >KY073746_10-cand-900-979
  source 1..80: mol_type = other DNA

SEQ ID NO: 19571 - DNA, 80 bp, synthetic construct
  misc_feature 1..80: note = Synthetic: >KY073746_11-cand-0-79
  source 1..80: mol_type = other DNA
gactgaaaagaaagatgacgtcgtggacggtctgaatattgctgcccctgcttttgagccaaaagaacagcgcgaaccgc

SEQ ID NO: 19572 - DNA, 80 bp, synthetic construct
  misc_feature 1..80: note = Synthetic: >KY073746_11-cand-180-259
  source 1..80: mol_type = other DNA
aacagtttgtgtcttaattctcaactaaacacatgctttttcttgttcttttgaaagagtgtacattacacttgacattg

SEQ ID NO: 19573 - DNA, 80 bp, synthetic construct
  misc_feature 1..80: note = Synthetic: >KY073746_11-cand-370-449
  source 1..80: mol_type = other DNA
cctttcttacatagcacagtacgcggttgacacttgtgtttttatgtacatttgtgtttcattagttgttccttatgatt

SEQ ID NO: 19574 - DNA, 80 bp, synthetic construct
  misc_feature 1..80: note = Synthetic: >KY073746_11-cand-460-539
  source 1..80: mol_type = other DNA
tttgcaggactgtagtttgttggattagccaacatttcccacctaaccttttcttggttgacccttttggtaatagtcaa

SEQ ID NO: 19575 - DNA, 80 bp, synthetic construct
  misc_feature 1..80: note = Synthetic: >KY073746_11-cand-550-629
  source 1..80: mol_type = other DNA
taccttatggacccagtttgcattttcgtgactgccataataattgtgctttttctcacggttgtctattacatttccct

SEQ ID NO: 19576 - DNA, 80 bp, synthetic construct
  misc_feature 1..80: note = Synthetic: >KY073746_11-cand-640-719
  source 1..80: mol_type = other DNA
attctagagactgctgcccgtcaggcgtggttgctgaagcaatctcgcattccagagaagcagcgtctccttgaaatgta

SEQ ID NO: 19577 - DNA, 80 bp, synthetic construct
  misc_feature 1..80: note = Synthetic: >KY073746_11-cand-730-809
  source 1..80: mol_type = other DNA
ctccattcttgcattgtttctcgcagtggagttcttcattcttgaggaacttccatttgccttacttgtctctgaatggt

SEQ ID NO: 19578 - DNA, 80 bp, synthetic construct
  misc_feature 1..80: note = Synthetic: >KY073746_11-cand-820-899
  source 1..80: mol_type = other DNA
tgtaaatgttgtgttttcattcacttcatttggggcgaatgtgcttttcacacttaatttctgttttgtgtggttagggt

SEQ ID NO: 19579 - DNA, 80 bp, synthetic construct
  misc_feature 1..80: note = Synthetic: >KY073746_11-cand-900-979
  source 1..80: mol_type = other DNA
tcttagctatggcaccttttatttatgaaaattttcttcctggtgccatagacaggtgggtattctttcttcaatctttg

SEQ ID NO: 19580 - DNA, 80 bp, synthetic construct
  misc_feature 1..80: note = Synthetic: >KY073746_12-cand-0-79
  source 1..80: mol_type = other DNA
tgtcattgcagttcagagttctgacggttttgttgcatcatcaacatatgatgaggatgctcactaccgtaagcttgacc

SEQ ID NO: 19581 - DNA, 80 bp, synthetic construct
  misc_feature 1..80: note = Synthetic: >KY073746_12-cand-180-259
  source 1..80: mol_type = other DNA
tgtcattgatatcagtgctggttattttggcctttatgatgatatcataaatagccatacaccatggttcgtccgcaaac

SEQ ID NO: 19582 - DNA, 80 bp, synthetic construct
  misc_feature 1..80: note = Synthetic: >KY073746_12-cand-260-339
  source 1..80: mol_type = other DNA
tttcgggtcttgtggatgttgcctgggataaatttgtgactgcacttaaaagtttgtctgtcactagtgcacagcttgtc

SEQ ID NO: 19583 - DNA, 80 bp, synthetic construct
  misc_feature 1..80: note = Synthetic: >KY073746_12-cand-340-419
  source 1..80: mol_type = other DNA
aaactcctgaaagccattggctctgcggctattgctgttactaatggtgttatcagggttgttgctgatgtaccggctat

SEQ ID NO: 19584 - DNA, 80 bp, synthetic construct
  misc_feature 1..80: note = Synthetic: >KY073746_12-cand-420-499
  source 1..80: mol_type = other DNA
gtttgccgatgcctttgagctgcttaaatccgctgttagcaccattttcgacgtcgcgtcggaagtggttactattggtg

SEQ ID NO: 19585 - DNA, 80 bp, synthetic construct
  misc_feature 1..80: note = Synthetic: >KY073746_12-cand-660-739
  source 1..80: mol_type = other DNA
tgagcctgctgttgttaatttgaagcttgttgatcaagctcctccaattgacaagaaaggcagaattaaggtgattggcg

SEQ ID NO: 19586 - DNA, 80 bp, synthetic construct
  misc_feature 1..80: note = Synthetic: >KY073746_12-cand-990-1069
  source 1..80: mol_type = other DNA
tgctgtaaagcgtgagtacatgctttgcacacccttttacatgaagcctgtggctgataagtgggaggcgttttgtgtga

SEQ ID NO: 19587 - DNA, 80 bp, synthetic construct
  misc_feature 1..80: note = Synthetic: >KY073746_12-cand-1300-1379
  source 1..80: mol_type = other DNA
cctgacggtttgctgggtagttgtgctaagaagttccgccagtttatggatttacttcttaagctttacaatgaatttct

SEQ ID NO: 19588 - DNA, 80 bp, synthetic construct
  misc_feature 1..80: note = Synthetic: >KY073746_12-cand-1550-1629
  source 1..80: mol_type = other DNA
atgccacttatgctattgacaatccaaaggttgctgatgttgaacccctggaactttcagaggttgactttgtgcctcct

SEQ ID NO: 19589 - DNA, 80 bp, synthetic construct
  misc_feature 1..80: note = Synthetic: >KY073746_4-cand-220-299
  source 1..80: mol_type = other DNA
acctgccggtagctgggagtttaagaactacttcgaggatagtaacgagatcaccgtgaatggtgtcgtttactacctcg

SEQ ID NO: 19590 - DNA, 80 bp, synthetic construct; identical to SEQ ID NO: 19540
  misc_feature 1..80: note = Synthetic: >KY073746_5-cand-340-419
  source 1..80: mol_type = other DNA

SEQ ID NO: 19591 - DNA, 80 bp, synthetic construct
  misc_feature 1..80: note = Synthetic: >KY073746_7-cand-130-209
  source 1..80: mol_type = other DNA
atgtacaatgtctctgaacgcactgtttgtattcaaactactcagtttactacaaatctgacatttgatgcacctgaccc

SEQ ID NO: 19592 - DNA, 80 bp, synthetic construct
  misc_feature 1..80: note = Synthetic: >KY073746_7-cand-220-299
  source 1..80: mol_type = other DNA
caccctaattggtctcaaccagcgtctttgtactatgaactgtcaatcacttctgttgattgccctttcaattttaagac

SEQ ID NO: 19593 - DNA, 80 bp, synthetic construct
  misc_feature 1..80: note = Synthetic: >KY073746_7-cand-310-389
  source 1..80: mol_type = other DNA
tatgtgaccttcgaatccatttgtttctctttagatgcaatccctggtgcttgcagtttaaagattaacaaggtgtggag

SEQ ID NO: 19594 - DNA, 80 bp, synthetic construct
  misc_feature 1..80: note = Synthetic: >KY073746_7-cand-400-479
  source 1..80: mol_type = other DNA
ttgcccttcagcgccttgtatgtcacttataaggttggtaacactattactggtgtgcctcaacctaatgttggtgtcct

SEQ ID NO: 19595 - DNA, 80 bp, synthetic construct
  misc_feature 1..80: note = Synthetic: >KY073746_7-cand-490-569
  source 1..80: mol_type = other DNA
gttgttcatttaggtgagtgtacagactacactatatatggcaattcgggccgtggtgttattaggaaaactaatagcac

SEQ ID NO: 19596 - DNA, 80 bp, synthetic construct
  misc_feature 1..80: note = Synthetic: >KY073746_7-cand-580-659
  source 1..80: mol_type = other DNA
ggtctttactacacttctaattctggcatgttgctgggttacaaaaattccaccacaggtgaaatattttctgttgtccc

SEQ ID NO: 19597 - DNA, 80 bp, synthetic construct
  misc_feature 1..80: note = Synthetic: >KY073746_7-cand-670-749
  source 1..80: mol_type = other DNA
tctgtccaagctgttgtcatcgatggtgaaattgtaggtgccatgtctagtagtgaaaatctcacgcttgctcttgagat

SEQ ID NO: 19598 - DNA, 80 bp, synthetic construct
  misc_feature 1..80: note = Synthetic: >KY073746_7-cand-750-829
  source 1..80: mol_type = other DNA
gaactacactactgttacacccacattttactaccattctatggctaataacacttgtgataaccccgtgttggtgtatt

SEQ ID NO: 19599 - DNA, 80 bp, synthetic construct
  misc_feature 1..80: note = Synthetic: >KY073746_8-cand-630-709
  source 1..80: mol_type = other DNA
aacgttgtgcacataagctcaataggttaaagctcagctttgtcactaacttaccaccttcttgtgcgcttagaggcctg

SEQ ID NO: 19600 - DNA, 80 bp, synthetic construct
  misc_feature 1..80: note = Synthetic: >KY073746_8-cand-810-889
  source 1..80: mol_type = other DNA
atggtgtcaacgtcaaggatgttgtcgttgacatttcacaatcttaccagtctcagattggtgtggtttcagacggcaaa

SEQ ID NO: 19601 - DNA, 80 bp, synthetic construct
  misc_feature 1..80: note = Synthetic: >KY073746_9-cand-0-79
  source 1..80: mol_type = other DNA
ccctcgaattggtcttgccaatctggccagaacaattttcgtggtgcgcgcggtatatttatcaggtaccattccggtgc

SEQ ID NO: 19602 - DNA, 80 bp, synthetic construct
  misc_feature 1..80: note = Synthetic: >KY073746_9-cand-70-149
  source 1..80: mol_type = other DNA
attccggtgcggagaagtttgaagttggtatttcgccaactcccttttcagataaagagtattctctttatatgtactgg

SEQ ID NO: 19603 - DNA, 80 bp, synthetic construct
  misc_feature 1..80: note = Synthetic: >KY073746_9-cand-150-229
  source 1..80: mol_type = other DNA
cgtggtaataatcctgataatagatatgcacagctgcgtgtttgtaagtggcggtaccctttcaatcttactggtgatag

SEQ ID NO: 19604 - DNA, 80 bp, synthetic construct
  misc_feature 1..80: note = Synthetic: >KY073746_9-cand-240-319
  source 1..80: mol_type = other DNA
cgaggtgttgattgccttattaagacgtcattcttgctctattttgaacacggtaagcctaacatcatagggttgacttg

SEQ ID NO: 19605 - DNA, 80 bp, synthetic construct
  misc_feature 1..80: note = Synthetic: >KY073746_9-cand-450-529
  source 1..80: mol_type = other DNA
agcacttttaatgtcaccactaatgctgatggccttattactgattatgaactctgccaggagtgtgatgggtttcctcg

SEQ ID NO: 19606 - DNA, 80 bp, synthetic construct
  misc_feature 1..80: note = Synthetic: >KY073746_9-cand-540-619
  source 1..80: mol_type = other DNA
gctgttgaagaaggtgggcttatacctgccgatttcgactatactaattggtttctcctcaccaacacttcgtctcttat

SEQ ID NO: 19607 - DNA, 80 bp, synthetic construct
  misc_feature 1..80: note = Synthetic: >KY073746_9-cand-630-709
  source 1..80: mol_type = other DNA
gttgtatcttctcaacctctgcgcattaattgtttatggcctgtgccagcgctggctagtactgcagcacttgttaattt

SEQ ID NO: 19608 - DNA, 80 bp, synthetic construct
  misc_feature 1..80: note = Synthetic: >KY073746_9-cand-720-799
  source 1..80: mol_type = other DNA
gatagacaacgttgcaatggttttgttgaggaaaatgttacatcagatgttctacggttttccctcaacttttcctcaga

SEQ ID NO: 19609 - DNA, 80 bp, synthetic construct
  misc_feature 1..80: note = Synthetic: >KY073746_9-cand-810-889
  source 1..80: mol_type = other DNA
ttgggtggtgttggtagtgtcactctttatggtcttgaaagtcctgactttcaaatttcatttagctgtgttaatgacac

SEQ ID NO: 19610 - DNA, 80 bp, synthetic construct
  misc_feature 1..80: note = Synthetic: >KY073746_9-cand-880-959
  source 1..80: mol_type = other DNA
ttaatgacactgacccttacacgcgggaccacaagattatttttggcccggtaccagaaccttattattgctttgctggt

SEQ ID NO: 19611 - DNA, 80 bp, synthetic construct
  misc_feature 1..80: note = Synthetic: >KY073747_1-cand-0-79
  source 1..80: mol_type = other DNA
attaccaacattcagactttaatgttacagttacagcaacttttggtgggccgtgttacacttgtagacctgcttctgtg

SEQ ID NO: 19612 - DNA, 80 bp, synthetic construct
  misc_feature 1..80: note = Synthetic: >KY073747_1-cand-120-199
  source 1..80: mol_type = other DNA
attgtgttaggacgtcacatttcactgcgcactatgtgtataatccaactattagtagtgctggtgattcatcttggcat

SEQ ID NO: 19613 - DNA, 80 bp, synthetic construct
  misc_feature 1..80: note = Synthetic: >KY073747_2-cand-0-79
  source 1..80: mol_type = other DNA
tttactatttgggcacaggaccacataaggaatcaaaattcagagaacgcattgatggtgtggtctgggttgcagttaat

SEQ ID NO: 19614 - DNA, 80 bp, synthetic construct
  misc_feature 1..80: note = Synthetic: >KY073747_2-cand-300-379
  source 1..80: mol_type = other DNA
atgacatcatgaaagctgttgctgctgcgttgaaatccttgggttttgaaaaacctcaagaacctcaacagaagaaaaag

SEQ ID NO: 19615 - DNA, 80 bp, synthetic construct
  misc_feature 1..80: note = Synthetic: >KY073747_3-cand-140-219
  source 1..80: mol_type = other DNA
cctcaaccaccacaagacgggtgttgttaaagttaaaatttgtaaatggcttcgttatgttgattttaatgctccttcaa

SEQ ID NO: 19616 - DNA, 80 bp, synthetic construct
  misc_feature 1..80: note = Synthetic: >KY073747_3-cand-240-319
  source 1..80: mol_type = other DNA
tatatagttaactttgaaacaggtgacaagaaagatcatacactaggtttcacagcttcaggtgacactgtcagaattca

SEQ ID NO: 19617 - DNA, 80 bp, synthetic construct
  misc_feature 1..80: note = Synthetic: >KY073747_3-cand-340-419
  source 1..80: mol_type = other DNA
ctgtgtatgtgcctggtgcatacagatggaacactgttcatgtcagatgtactgatattagtgcttgttttttcagcatt

SEQ ID NO: 19618 - DNA, 80 bp, synthetic construct
  misc_feature 1..80: note = Synthetic: >KY073747_3-cand-440-519
  source 1..80: mol_type = other DNA
taatgttactatgactaatggtaacattagcgcatacaatgtatgtagcaactgtgatggttacgctgacaatatatttg

SEQ ID NO: 19619 - DNA, 80 bp, synthetic construct
  misc_feature 1..80: note = Synthetic: >KY073748_1-cand-0-79
  source 1..80: mol_type = other DNA
gtggtgcttttactggtcagtttactaatgtacatggtgtttttgttggctattataatagtggtttgcgtagttatttt

SEQ ID NO: 19620 - DNA, 80 bp, synthetic construct
  misc_feature 1..80: note = Synthetic: >KY073748_1-cand-130-209
  source 1..80: mol_type = other DNA
tcagatgaataaccagcaggggttgttctacttgaaagtttgtaaatattcagccatgcaaatacccggtactggtccac

SEQ ID NO: 19621 - DNA, 80 bp, synthetic construct
  misc_feature 1..80: note = Synthetic: >KY073748_1-cand-260-339
  source 1..80: mol_type = other DNA
caagctggtgttatttatggtttcactgtttcaggggacactgttaggctgcattgggttgatggtgtttacacttttta

SEQ ID NO: 19622 - DNA, 80 bp, synthetic construct
  misc_feature 1..80: note = Synthetic: >KY073748_1-cand-310-389
  source 1..80: mol_type = other DNA
gcattgggttgatggtgtttacactttttatgtaccgggtgctagtaaatggaattctgtaggtgttaagtgcccactcg

SEQ ID NO: 19623 - DNA, 80 bp, synthetic construct
  misc_feature 1..80: note = Synthetic: >KY073748_2-cand-110-189
  source 1..80: mol_type = other DNA
aaaccatctcaggtattgctgacgcaacagcatccaattgtacctactctcaatccagttgctccagaatttaaccccac

SEQ ID NO: 19624 - DNA, 80 bp, synthetic construct
  misc_feature 1..80: note = Synthetic: >KY073748_2-cand-210-289
  source 1..80: mol_type = other DNA
agccaatctatgaagtaccaactgagatcgacatagtcgacgaagtcaactaaaacaattatgcgatggtatttaccatt

SEQ ID NO: 19625 - DNA, 80 bp, synthetic construct
  misc_feature 1..80: note = Synthetic: >KY073748_2-cand-310-389
  source 1..80: mol_type = other DNA
ctgctgaagtaatactccaaaaatcttctaatattcctgtttgtggccaaaaattttctctttattggtttttgaaacct

SEQ ID NO: 19626 - DNA, 80 bp, synthetic construct
  misc_feature 1..80: note = Synthetic: >KY073748_2-cand-410-489
  source 1..80: mol_type = other DNA
cagtgttgagtctattaaggttctagtgttgaaaaatacgctacttttgtgtttctaaaaaaacaacacagtgctttgca

SEQ ID NO: 19627 - DNA, 80 bp, synthetic construct
  misc_feature 1..80: note = Synthetic: >KY073748_3-cand-0-79
  source 1..80: mol_type = other DNA
ggcactgctgatgttttgcgttataacctcaattttactgacgattctgttgacaatctcaagtctggtgtgattgttat

SEQ ID NO: 19628 - DNA, 80 bp, synthetic construct
  misc_feature 1..80: note = Synthetic: >KY073748_3-cand-190-269
  source 1..80: mol_type = other DNA
gtagtgtaaatggcaccatgcttaacacctttgttggtgttttaccaccaactgttagagaatttgtcttggcacgaact

SEQ ID NO: 19629 - DNA, 80 bp, synthetic construct
  misc_feature 1..80: note = Synthetic: >KY073748_3-cand-280-359
  source 1..80: mol_type = other DNA
atatcaatgggtttaagtattttgatctcggttcaatagaagcagttaattttaacatcacaactgctagtaccactgac

SEQ ID NO: 19630 - DNA, 80 bp, synthetic construct
  misc_feature 1..80: note = Synthetic: >KY073748_3-cand-370-449
  source 1..80: mol_type = other DNA
ttgcatttgcaagttttgctgatgtgttagttaatgtcagtgcgactgatattcagaacgtgttgtactgtgacagtgat

SEQ ID NO: 19631 - DNA, 80 bp, synthetic construct
  misc_feature 1..80: note = Synthetic: >KY073748_3-cand-460-539
  source 1..80: mol_type = other DNA
tacgctgtgaacacctacagttcgaccttcaggatggtttttactcggccaattttcttgatgccaaggaatataaaccc

SEQ ID NO: 19632 - DNA, 80 bp, synthetic construct
  misc_feature 1..80: note = Synthetic: >KY073748_3-cand-550-629
  source 1..80: mol_type = other DNA
ctctgcctgtgcattatcagcattctaacatttatgttaatgcaacacctgattttcatagcactagtacgtcttcttgt

SEQ ID NO: 19633 - DNA, 80 bp, synthetic construct
  misc_feature 1..80: note = Synthetic: >KY073748_3-cand-640-719
  source 1..80: mol_type = other DNA
caccccagtctgtaaatcttactatttcaggtctgcaggagagtggtggtttgtactgtgtgttaacatcacatttcact

SEQ ID NO: 19634 - DNA, 80 bp, synthetic construct
  misc_feature 1..80: note = Synthetic: >KY073748_3-cand-730-809
  source 1..80: mol_type = other DNA
acaggattaggactagtgctactgatgatgcttcgtggcgaatttttctagaatcaggcacatgctccatttcatttgat

SEQ ID NO: 19635 - DNA, 80 bp, synthetic construct
  misc_feature 1..80: note = Synthetic: >KY073748_3-cand-820-899
  source 1..80: mol_type = other DNA
actttcaaaagtttggaactctgtgtttttcattgagagaaattcctggtgggtgtaatatgccactaatagcatcatgg

SEQ ID NO: 19636 - DNA, 80 bp, synthetic construct
  misc_feature 1..80: note = Synthetic: >KY073748_3-cand-890-969
  source 1..80: mol_type = other DNA
agcatcatgggccgggctaaaccctttcgcgatgggtgcattgtacctatcctggactgaaggtgactctattactggtg

SEQ ID NO: 19637 - DNA, 80 bp, synthetic construct
  misc_feature 1..80: note = Synthetic: >KY292377_2-cand-20-99
  source 1..80: mol_type = other DNA
attaaatatgttaatgtaactcatgttgaaactgtggatgataatataggtgttatcaaacctatttcaacaggtaacat

SEQ ID NO: 19638 - DNA, 80 bp, synthetic construct
  misc_feature 1..80: note = Synthetic: >KY292377_2-cand-170-249
  source 1..80: mol_type = other DNA
gtggattgcgctaagtatgtttgcaatggcaatagacattgcctcagtctactcacacaatacacttctgcttgtcaaac

SEQ ID NO: 19639 - DNA, 80 bp, synthetic construct
  misc_feature 1..80: note = Synthetic: >KY292377_3-cand-260-339
  source 1..80: mol_type = other DNA
agctgggcttccaagatatttcgaacttggtaaaagatgaatgcactgactacaacatatatggattccagggcacaggc

SEQ ID NO: 19640 - DNA, 80 bp, synthetic construct
  misc_feature 1..80: note = Synthetic: >KY292377_4-cand-0-79
  source 1..80: mol_type = other DNA
cttaccatattgtggagtaggtgataattgtggatggtacaattttgtttacaagtcgcacgacaacataaatggtaagt

SEQ ID NO: 19641 - DNA, 80 bp, synthetic construct
  misc_feature 1..80: note = Synthetic: >KY292377_4-cand-90-169
  source 1..80: mol_type = other DNA
aaatacgcaaaacttgaacataccgaatgttcatggtgtgtacttcgatgtaagagaacataactctgatggcgtgtggg

SEQ ID NO: 19642 - DNA, 80 bp, synthetic construct
  misc_feature 1..80: note = Synthetic: >KY292377_4-cand-180-259
  source 1..80: mol_type = other DNA
tagagttggcttattgatagccatacatggccatacgcattatagtctactaatggttttacaggatgacgtggaggaga

SEQ ID NO: 19643 - DNA, 80 bp, synthetic construct
  misc_feature 1..80: note = Synthetic: >KY292377_4-cand-280-359
  source 1..80: mol_type = other DNA
aaaatctgtcattggcaaccaggtaacataagttcctaccatgaaccgactcttaatataggggatggtggtcaatgtgt

SEQ ID NO: 19644 - DNA, 80 bp, synthetic construct
  misc_feature 1..80: note = Synthetic: >KY352407_1-cand-30-109
  source 1..80: mol_type = other DNA
taaaggcgaatgtcctaaattcgtttttcctctaaactctaaaattcgggttttacaacctagagttgaaaagaggaaga

SEQ ID NO: 19645 - DNA, 80 bp, synthetic construct
  misc_feature 1..80: note = Synthetic: >KY352407_2-cand-0-79
  source 1..80: mol_type = other DNA
agaatgcgggtcaagatataagtcttttggatgttgcatatgctaattacaacacatatgatgttgttctttcaccgtta

SEQ ID NO: 19646 - DNA, 80 bp, synthetic construct
  misc_feature 1..80: note = Synthetic: >KY352407_2-cand-100-179
  source 1..80: mol_type = other DNA
tgttgaccccggcctctccttagaatcatgtgtcagagtagcaaaaaataaggtttactttgttgttaatgataaaaagt

SEQ ID NO: 19647 - DNA, 80 bp, synthetic construct
  misc_feature 1..80: note = Synthetic: >KY352407_3-cand-120-199
  source 1..80: mol_type = other DNA
tgtcaattggtgaagatcaatctattgcttattctaataatattatagctataccaactaattttagtattagtgtgacc

SEQ ID NO: 19648 - DNA, 80 bp, synthetic construct
  misc_feature 1..80: note = Synthetic: >KY352407_3-cand-230-309
  source 1..80: mol_type = other DNA
acttctgttgattgcaacatgtatatttgtggtgattctacagagtgtagcaatttattgctacagtatggtagtttctg

SEQ ID NO: 19649 - DNA, 80 bp, synthetic construct
  misc_feature 1..80: note = Synthetic: >KY352407_3-cand-340-419
  source 1..80: mol_type = other DNA
tgctgtcgaacaagacagaaacactagagatgtgtttgcacagactaaatccatctataaaactcctaatattaaggact

SEQ ID NO: 19650 - DNA, 80 bp, synthetic construct
  misc_feature 1..80: note = Synthetic: >KY352407_3-cand-450-529
  source 1..80: mol_type = other DNA
cagaccctaaaaaactttcctacaggtctttcattgaggaccttctttataacaaggtcacattatctgatcctggtttt

SEQ ID NO: 19651 - DNA, 80 bp, synthetic construct
  misc_feature 1..80: note = Synthetic: >KY352407_4-cand-0-79
  source 1..80: mol_type = other DNA
cgtgtgttgactacaggttatttcttgcctttcaatagtaatcttactggttatagttcaagaaattcagttactggacg

SEQ ID NO: 19652 - DNA, 80 bp, synthetic construct
  misc_feature 1..80: note = Synthetic: >KY352407_4-cand-90-169
  source 1..80: mol_type = other DNA
tttgataatccaaacataccatttaaggatggtttgtattttgcggcaacagaaaggtccaacgttatacgcggttggat

SEQ ID NO: 19653 - DNA, 80 bp, synthetic construct
  misc_feature 1..80: note = Synthetic: >KY352407_4-cand-170-249
  source 1..80: mol_type = other DNA
ttttggctctacactagacaacacaactcaatccgctgtgctttttaataatggtacacacattgttattaatgtgtgta

SEQ ID NO: 19654 - DNA, 80 bp, synthetic construct
  misc_feature 1..80: note = Synthetic: >KY352407_4-cand-260-339
  source 1..80: mol_type = other DNA
ttgccaagatcccatgttggcagtggctaatggttctcattttaaatcttgggtttttcttaatgccaccaattgtacat

SEQ ID NO: 19655 - DNA, 80 bp, synthetic construct
  misc_feature 1..80: note = Synthetic: >KY352407_4-cand-350-429
  source 1..80: mol_type = other DNA
acatggttttgagattgaccctagtccaaatacaggttcctttatacatttaagagaacatgtatttagaaatgtggatg

SEQ ID NO: 19656 - DNA, 80 bp, synthetic construct
  misc_feature 1..80: note = Synthetic: >KY352407_4-cand-450-529
  source 1..80: mol_type = other DNA
aattatgaaagagtagatgtttatgacaacttccctcagggattttctgtcctaaaacctatattcaaattaccttttgg

SEQ ID NO: 19657 - DNA, 80 bp, synthetic construct
  misc_feature 1..80: note = Synthetic: >KY352407_4-cand-540-619
  source 1..80: mol_type = other DNA
acacagtttaaagtcatcatgactttgttttcacctactacaagttcctttaatgcagatgcttctgtttattttgtagg

SEQ ID NO: 19658 - DNA, 80 bp, synthetic construct
  misc_feature 1..80: note = Synthetic: >KY352407_4-cand-720-799
  source 1..80: mol_type = other DNA
accactaaaagccttactgttgaaaaaggaatttaccaaacttcaaacttccgtgtttcacctagtactgaagtagtaag

SEQ ID NO: 19659 - DNA, 80 bp, synthetic construct
  misc_feature 1..80: note = Synthetic: >KY352407_4-cand-770-849
  source 1..80: mol_type = other DNA
ccgtgtttcacctagtactgaagtagtaagatttcctaacataacaaacctttgtccttttggccaagtgttcaatgctt

SEQ ID NO: 19660 - DNA, 80 bp, synthetic construct
  misc_feature 1..80: note = Synthetic: >KY352407_5-cand-0-79
  source 1..80: mol_type = other DNA
gaggaagtagtaattattcttgcttctatgtcagcatctacaagtgcattcatagaaactgttaaaaacctagattatag

SEQ ID NO: 19661 - DNA, 80 bp, synthetic construct
  misc_feature 1..80: note = Synthetic: >KY352407_5-cand-70-149
  source 1..80: mol_type = other DNA
tagattatagcgtctttaaaaccattgttgaatcttgtggtagctacaaagttactaagggtaaacacagggctggcgct

SEQ ID NO: 19662 - DNA, 80 bp, synthetic construct
  misc_feature 1..80: note = Synthetic: >KY352407_5-cand-150-229
  source 1..80: mol_type = other DNA
tggaacataggttctaacaagactttactcacacctctgtgtgggttttcttcacaagctgcttgcgtggttaggtcaat

SEQ ID NO: 19663 - DNA, 80 bp, synthetic construct
  misc_feature 1..80: note = Synthetic: >KY352407_5-cand-230-309
  source 1..80: mol_type = other DNA
cttctcacgcacagtggacacagctggtcaatccattcaagcattacagacagccgccatgacaatattttcagacattt

SEQ ID NO: 19664 - DNA, 80 bp, synthetic construct
  misc_feature 1..80: note = Synthetic: >KY352407_5-cand-310-389
  source 1..80: mol_type = other DNA
ctgatctttctaaccgtttgttagatgctatgatcaacacagctggactagtcactgacagtgtcatagttatggcatat

SEQ ID NO: 19665 - DNA, 80 bp, synthetic construct
  misc_feature 1..80: note = Synthetic: >KY352407_5-cand-390-469
  source 1..80: mol_type = other DNA
gttactggtggcttggttcaacaagttgagaaatggcttcaccagttattgggttctacagcagacaaccttaagaatgt

SEQ ID NO: 19666 - DNA, 80 bp, synthetic construct
  misc_feature 1..80: note = Synthetic: >KY352407_5-cand-470-549
  source 1..80: mol_type = other DNA
cttggtttggcttgaaagtcaattgcagaaaggcgtgagcttccttaaggaggcttggcacatcttgcagtttcttgtca

SEQ ID NO: 19667 - DNA, 80 bp, synthetic construct
  misc_feature 1..80: note = Synthetic: >KY352407_5-cand-550-629
  source 1..80: mol_type = other DNA
ctggcgcttacactattgtgaaaggccagattcaggttgttaatgaaggcttgttacattttgttaggtctttcattagc

SEQ ID NO: 19668 - DNA, 80 bp, synthetic construct
  misc_feature 1..80: note = Synthetic: >KY352407_5-cand-640-719
  source 1..80: mol_type = other DNA
aggcattagagttgtgtactgattatatactgttagctggtgctagagttcgcacaataaatttaggtgaagtacttatt

SEQ ID NO: 19669 - DNA, 80 bp, synthetic construct
  misc_feature 1..80: note = Synthetic: >KY352407_5-cand-720-799
  source 1..80: mol_type = other DNA
gctcaaagtagaggtttttaccgaaaatgtgtgcgtgctaaagaacagttacagttactcatgcctcttaaagcacctaa

SEQ ID NO: 19670 - DNA, 80 bp, synthetic construct
  misc_feature 1..80: note = Synthetic: >KY352407_5-cand-810-889
  source 1..80: mol_type = other DNA
ttcttggaaggtgatacatgtgacacattgttaacttcagaagaagttgttattaaaactggcaccttagaagctactga

SEQ ID NO: 19671 - DNA, 80 bp, synthetic construct
  misc_feature 1..80: note = Synthetic: >KY352407_5-cand-890-969
  source 1..80: mol_type = other DNA
ctttgtacttagtgacattgtaaatggagtagcagaaggaactcctgtttgtgtgaacggtctcatgctgcttgaactta

SEQ ID NO: 19672 - DNA, 80 bp, synthetic construct
  misc_feature 1..80: note = Synthetic: >KY352407_5-cand-980-1059
  source 1..80: mol_type = other DNA
ccagtactgtgctctcacaccagccttattggctactaataatgtttttacactcaagggtggtgcaccttctaaaggtg

SEQ ID NO: 19673 - DNA, 80 bp, synthetic construct
  misc_feature 1..80: note = Synthetic: >KY352407_5-cand-1060-1139
  source 1..80: mol_type = other DNA
ttacctttggtgaaaacacagttgtagaagtccaaggttataaaaatgtgaaaatcacatttgaacttgatgagcgtgtc

SEQ ID NO: 19674 - DNA, 80 bp, synthetic construct
  misc_feature 1..80: note = Synthetic: >KY352407_5-cand-1140-1219
  source 1..80: mol_type = other DNA
gacaaagtcctcaacgagaaatgttcctcatacactgtggagacaggtactcaattggaggaatttgcatgtgttgtgtc

SEQ ID NO: 19675 - DNA, 80 bp, synthetic construct
  misc_feature 1..80: note = Synthetic: >KY352407_5-cand-1220-1299
  source 1..80: mol_type = other DNA
agatacagttgtgaaaactttacaacctatctcagaccttttaacaccaatgggcattgaccttgatgaatggagtgttt

SEQ ID NO: 19676 - DNA, 80 bp, synthetic construct
  misc_feature 1..80: note = Synthetic: >KY352407_5-cand-1300-1379
  source 1..80: mol_type = other DNA
caacttactatctctttgatgagtcaggtgaggcagttatggcttcacacatgtactgttccttttacgctccagacgaa

SEQ ID NO: 19677 - DNA, 80 bp, synthetic construct
  misc_feature 1..80: note = Synthetic: >KY352407_5-cand-1380-1459
  source 1..80: mol_type = other DNA
gatgaggaagagccatgtgaggttgagtatggtaccgaagatgattacaacggtacaccactagaatttggtgctagtac

SEQ ID NO: 19678 - DNA, 80 bp, synthetic construct
  misc_feature 1..80: note = Synthetic: >KY417142_1-cand-0-79
  source 1..80: mol_type = other DNA
ttttaattgcacatatgatagagtagagagaagttttcagctcgatactgctcctaaaactggaaattttaaagacctac

SEQ ID NO: 19679 - DNA, 80 bp, synthetic construct; identical to SEQ ID NO: 18481
  misc_feature 1..80: note = Synthetic: >KY417144_1-cand-40-119
  source 1..80: mol_type = other DNA

SEQ ID NO: 19680 - DNA, 80 bp, synthetic construct
  misc_feature 1..80: note = Synthetic: >KY417145_2-cand-170-249
  source 1..80: mol_type = other DNA
ctgcattgcttgtgaataatggtagtgctattacaatacaagtctgttacttccaattctgtgacaaccctgcttttgta

SEQ ID NO: 19681 - DNA, 80 bp, synthetic construct
  misc_feature 1..80: note = Synthetic: >KY417147_1-cand-0-79
  source 1..80: mol_type = other DNA
gttcaattgcacatatgacagagtggagagaagttttcagctcgataccgctcctaaaactggaaattttaaagacttac

SEQ ID NO: 19682 - DNA, 80 bp, synthetic construct
  misc_feature 1..80: note = Synthetic: >KY417147_1-cand-280-359
  source 1..80: mol_type = other DNA
gctgcttattatgttggtaatctaaaatataccacctttatgcttagttttaatgaaaatgggactatcactgatgctat

SEQ ID NO: 19683 - DNA, 80 bp, synthetic construct; identical to SEQ ID NO: 19681
  misc_feature 1..80: note = Synthetic: >KY417148_1-cand-0-79
  source 1..80: mol_type = other DNA

SEQ ID NO: 19684 - DNA, 80 bp, synthetic construct; identical to SEQ ID NO: 19682
  misc_feature 1..80: note = Synthetic: >KY417148_1-cand-280-359
  source 1..80: mol_type = other DNA

SEQ ID NO: 19685 - DNA, 80 bp, synthetic construct
  misc_feature 1..80: note = Synthetic: >KY419103_4-cand-310-389
  source 1..80: mol_type = other DNA
tttggccgtgatgcagaaattgccttgtcaatttaaagataaaaatttgcaggatctttgggtgttatataagcaacagt

SEQ ID NO: 19686 - DNA, 80 bp, synthetic construct
  misc_feature 1..80: note = Synthetic: >KY419103_4-cand-410-489
  source 1..80: mol_type = other DNA
accttggttaataagatacctgctaatattgtagttccacaaggtggttatgttgctgatttcgcatactggtttttaac

SEQ ID NO: 19687 - DNA, 80 bp, synthetic construct
  misc_feature 1..80: note = Synthetic: >KY419103_4-cand-510-589
  source 1..80: mol_type = other DNA
tagcatactggaaatgcattaaatgtgatttagctctcaagcttaaaggcttggatgctatgttcttttatggtgatgtt

SEQ ID NO: 19688 - DNA, 80 bp, synthetic construct
  misc_feature 1..80: note = Synthetic: >KY419104_2-cand-40-119
  source 1..80: mol_type = other DNA
ttggaggttgtgtgtattggagtccagcacgtaatatatggattcctatattaaaatcctctgttaagtcttatgacagt

SEQ ID NO: 19689 - DNA, 80 bp, synthetic construct
  misc_feature 1..80: note = Synthetic: >KY419104_3-cand-100-179
  source 1..80: mol_type = other DNA
gtttctatacaaccaggtcagcattgccctggcttgggtcttgtggaggatgattgctctggcaatccttgcacttgtaa

SEQ ID NO: 19690 - DNA, 80 bp, synthetic construct; identical to SEQ ID NO: 19688
  misc_feature 1..80: note = Synthetic: >KY419105_3-cand-40-119
  source 1..80: mol_type = other DNA

SEQ ID NO: 19691 - DNA, 80 bp, synthetic construct
  misc_feature 1..80: note = Synthetic: >KY419106_2-cand-40-119
  source 1..80: mol_type = other DNA
tacaaactttactaagtgtacttgctggtgccaaccagatccttcctcttataacggtgtaaatgcttggacttgtccgc

SEQ ID NO: 19692 - DNA, 80 bp, synthetic construct
  misc_feature 1..80: note = Synthetic: >KY419106_4-cand-60-139
  source 1..80: mol_type = other DNA
gtgttgccattaaacaggaggattcttctgaaatcttagagcacactttggatgatggtccatatgtggagacatctgag

SEQ ID NO: 19693 - DNA, 80 bp, synthetic construct; identical to SEQ ID NO: 19691
  misc_feature 1..80: note = Synthetic: >KY419107_2-cand-40-119
  source 1..80: mol_type = other DNA

SEQ ID NO: 19694 - DNA, 80 bp, synthetic construct; identical to SEQ ID NO: 19692
  misc_feature 1..80: note = Synthetic: >KY419107_4-cand-60-139
  source 1..80: mol_type = other DNA

SEQ ID NO: 19695 - DNA, 80 bp, synthetic construct; identical to SEQ ID NO: 19691
  misc_feature 1..80: note = Synthetic: >KY419109_2-cand-40-119
  source 1..80: mol_type = other DNA

SEQ ID NO: 19696 - DNA, 80 bp, synthetic construct; identical to SEQ ID NO: 19692
  misc_feature 1..80: note = Synthetic: >KY419109_4-cand-60-139
  source 1..80: mol_type = other DNA

SEQ ID NO: 19697 - DNA, 80 bp, synthetic construct; identical to SEQ ID NO: 19688
  misc_feature 1..80: note = Synthetic: >KY419110_3-cand-40-119
  source 1..80: mol_type = other DNA

SEQ ID NO: 19698 - DNA, 80 bp, synthetic construct; identical to SEQ ID NO: 19688
  misc_feature 1..80: note = Synthetic: >KY419112_2-cand-40-119
  source 1..80: mol_type = other DNA

SEQ ID NO: 19699 - DNA, 80 bp, synthetic construct; identical to SEQ ID NO: 19689
  misc_feature 1..80: note = Synthetic: >KY419112_3-cand-100-179
  source 1..80: mol_type = other DNA

SEQ ID NO: 19700 - DNA, 80 bp, synthetic construct; identical to SEQ ID NO: 19691
  misc_feature 1..80: note = Synthetic: >KY419113_2-cand-40-119
  source 1..80: mol_type = other DNA

SEQ ID NO: 19701 - DNA, 80 bp, synthetic construct; identical to SEQ ID NO: 19692
  misc_feature 1..80: note = Synthetic: >KY419113_4-cand-60-139
  source 1..80: mol_type = other DNA

SEQ ID NO: 19702 - DNA, 80 bp, synthetic construct
  misc_feature 1..80: note = Synthetic: >KY566209_1-cand-90-169
  source 1..80: mol_type = other DNA
agtgttaatttctccattagctcagttgagcagtatggtttctggaccatagcttacacaaattacaccgatgtaatggt

SEQ ID NO: 19703 - DNA, 80 bp, synthetic construct
  misc_feature 1..80: note = Synthetic: >KY566209_2-cand-0-79
  source 1..80: mol_type = other DNA
caatcttttcaactttctacaaacgtgggacataccaccaggtactgagactattcttggtggttatttaccatattgtg

SEQ ID NO: 19704 - DNA, 80 bp, synthetic construct
  misc_feature 1..80: note = Synthetic: >KY566209_2-cand-90-169
  source 1..80: mol_type = other DNA
caattgtggttggtataactttgtttttagccaaaatgtgggttctaatggcaagtactcatacataaacacacagaacc

SEQ ID NO: 19705 - DNA, 80 bp, synthetic construct
  misc_feature 1..80: note = Synthetic: >KY566209_2-cand-180-259
  source 1..80: mol_type = other DNA
taatgttcacggtgtgtattttgatgtacgtgaacacaactcagatggcctttgggacgaacgtgaccgcgttggtttgc

SEQ ID NO: 19706 - DNA, 80 bp, synthetic construct
  misc_feature 1..80: note = Synthetic: >KY566209_2-cand-270-349
  source 1..80: mol_type = other DNA
gcatggaaaatcacattatagtttgcttatggtcttacaagatgctgtggaagctaatgcaccagatgttgctgttaaaa

SEQ ID NO: 19707 - DNA, 80 bp, synthetic construct
  misc_feature 1..80: note = Synthetic: >KY566209_2-cand-360-439
  source 1..80: mol_type = other DNA
gcaacacttgactggtaacataagtatatatcacaagtggtctgccagtttaggtgacggtggtcaatgcgtgtttaata

SEQ ID NO: 19708 - DNA, 80 bp, synthetic construct
  misc_feature 1..80: note = Synthetic: >KY566209_3-cand-0-79
  source 1..80: mol_type = other DNA
ggctttattctacaagtatactagtttacaaggtttgtacacttattctaatttggttgagttacaaaattatgactgcc

SEQ ID NO: 19709 - DNA, 80 bp, synthetic construct
  misc_feature 1..80: note = Synthetic: >KY566209_3-cand-420-499
  source 1..80: mol_type = other DNA
tagtactactggcgaaattttcactgtagtaccatgtgacctaacagcacaagcggctgtgattaacgatgaaatagttg

SEQ ID NO: 19710 - DNA, 80 bp, synthetic construct
  misc_feature 1..80: note = Synthetic: >KY566209_3-cand-520-599
  source 1..80: mol_type = other DNA
caaactgacctgtttgagtttgtaaatcacacacatacaagaagatcacgtaggtcgccaactgaagcggtaaaaaccta

SEQ ID NO: 19711 - DNA, 80 bp, synthetic construct
  misc_feature 1..80: note = Synthetic: >KY566209_3-cand-620-699
  source 1..80: mol_type = other DNA
acataacaaagtggaataatgatacctcgactaattgtacatctgtcatcacttactcctcctttgctatttgtaatact

SEQ ID NO: 19712 - DNA, 80 bp, synthetic construct; identical to SEQ ID NO: 19702
  misc_feature 1..80: note = Synthetic: >KY566210_1-cand-90-169
  source 1..80: mol_type = other DNA

SEQ ID NO: 19713 - DNA, 80 bp, synthetic construct; identical to SEQ ID NO: 19703
  misc_feature 1..80: note = Synthetic: >KY566210_2-cand-0-79
  source 1..80: mol_type = other DNA

SEQ ID NO: 19714 - DNA, 80 bp, synthetic construct; identical to SEQ ID NO: 19704
  misc_feature 1..80: note = Synthetic: >KY566210_2-cand-90-169
  source 1..80: mol_type = other DNA

SEQ ID NO: 19715 - DNA, 80 bp, synthetic construct; identical to SEQ ID NO: 19705
  misc_feature 1..80: note = Synthetic: >KY566210_2-cand-180-259
  source 1..80: mol_type = other DNA

SEQ ID NO: 19716 - DNA, 80 bp, synthetic construct; identical to SEQ ID NO: 19706
  misc_feature 1..80: note = Synthetic: >KY566210_2-cand-270-349
  source 1..80: mol_type = other DNA

SEQ ID NO: 19717 - DNA, 80 bp, synthetic construct; identical to SEQ ID NO: 19707
  misc_feature 1..80: note = Synthetic: >KY566210_2-cand-360-439
  source 1..80: mol_type = other DNA

SEQ ID NO: 19718 - DNA, 80 bp, synthetic construct; identical to SEQ ID NO: 19708
  misc_feature 1..80: note = Synthetic: >KY566210_3-cand-0-79
  source 1..80: mol_type = other DNA

SEQ ID NO: 19719 - DNA, 80 bp, synthetic construct; identical to SEQ ID NO: 19709
  misc_feature 1..80: note = Synthetic: >KY566210_3-cand-420-499
  source 1..80: mol_type = other DNA

SEQ ID NO: 19720 - DNA, 80 bp, synthetic construct; identical to SEQ ID NO: 19710
  misc_feature 1..80: note = Synthetic: >KY566210_3-cand-520-599
  source 1..80: mol_type = other DNA

SEQ ID NO: 19721 - DNA, 80 bp, synthetic construct; identical to SEQ ID NO: 19711
  misc_feature 1..80: note = Synthetic: >KY566210_3-cand-620-699
  source 1..80: mol_type = other DNA

SEQ ID NO: 19722 - DNA, 80 bp, synthetic construct; identical to SEQ ID NO: 19703
  misc_feature 1..80: note = Synthetic: >KY566211_2-cand-0-79
  source 1..80: mol_type = other DNA

SEQ ID NO: 19723 - DNA, 80 bp, synthetic construct; identical to SEQ ID NO: 19704
  misc_feature 1..80: note = Synthetic: >KY566211_2-cand-90-169
  source 1..80: mol_type = other DNA

SEQ ID NO: 19724 - DNA, 80 bp, synthetic construct; identical to SEQ ID NO: 19705
  misc_feature 1..80: note = Synthetic: >KY566211_2-cand-180-259
  source 1..80: mol_type = other DNA

SEQ ID NO: 19725 - DNA, 80 bp, synthetic construct; identical to SEQ ID NO: 19706
  misc_feature 1..80: note = Synthetic: >KY566211_2-cand-270-349
  source 1..80: mol_type = other DNA

SEQ ID NO: 19726 - DNA, 80 bp, synthetic construct; identical to SEQ ID NO: 19707
  misc_feature 1..80: note = Synthetic: >KY566211_2-cand-360-439
  source 1..80: mol_type = other DNA

SEQ ID NO: 19727 - DNA, 80 bp, synthetic construct; identical to SEQ ID NO: 19709
  misc_feature 1..80: note = Synthetic: >KY566211_3-cand-420-499
  source 1..80: mol_type = other DNA

SEQ ID NO: 19728 - DNA, 80 bp, synthetic construct; identical to SEQ ID NO: 19710
  misc_feature 1..80: note = Synthetic: >KY566211_3-cand-520-599
  source 1..80: mol_type = other DNA

SEQ ID NO: 19729 - DNA, 80 bp, synthetic construct; identical to SEQ ID NO: 19711
  misc_feature 1..80: note = Synthetic: >KY566211_3-cand-620-699
  source 1..80: mol_type = other DNA

SEQ ID NO: 19730 - DNA, 80 bp, synthetic construct; identical to SEQ ID NO: 18959
  misc_feature 1..80: note = Synthetic: >KY938558_2-cand-0-79
  source 1..80: mol_type = other DNA

SEQ ID NO: 19731 - DNA, 80 bp, synthetic construct; identical to SEQ ID NO: 18960
  misc_feature 1..80: note = Synthetic: >KY938558_2-cand-690-769
  source 1..80: mol_type = other DNA

SEQ ID NO: 19732 - DNA, 80 bp, synthetic construct
  misc_feature 1..80: note = Synthetic: >MF094685_1-cand-40-119
  source 1..80: mol_type = other DNA
catgggagttgtggattcatagagcatggggccctaattcacctgttactgttagactctgtcgctggtggcaatttatg

SEQ ID NO: 19733 - DNA, 80 bp, synthetic construct
  misc_feature 1..80: note = Synthetic: >MF094685_2-cand-0-79
  source 1..80: mol_type = other DNA
ccagatgccacagaacgtcgtgattatgcacatcttattttacctaatggtaaattgaatccatttgttgaatgtaatgg

SEQ ID NO: 19734 - DNA, 80 bp, synthetic construct
  misc_feature 1..80: note = Synthetic: >MF094685_2-cand-90-169
  source 1..80: mol_type = other DNA
attgttgatggctgtgtccctggctttgtactacgtgttggtcgtggtgtagctgttaatcggactgttatcacaccata

SEQ ID NO: 19735 - DNA, 80 bp, synthetic construct
  misc_feature 1..80: note = Synthetic: >MF094686_1-cand-0-79
  source 1..80: mol_type = other DNA
ttggtattggcgtctttgcgcagactgcacatgcgtcctatgagtcaggagactccggttcgggtggttacacatttagt

SEQ ID NO: 19736 - DNA, 80 bp, synthetic construct
  misc_feature 1..80: note = Synthetic: >MF094686_1-cand-90-169
  source 1..80: mol_type = other DNA
agcatgtcactaacctcacatggtcgttatgggtgcatcgtccttggggagctaatgctgctgttactgtgcgtctttgt

SEQ ID NO: 19737 - DNA, 80 bp, synthetic construct
  misc_feature 1..80: note = Synthetic: >MF094686_1-cand-180-259
  source 1..80: mol_type = other DNA
aaagtatagcttttaatcagacagcacacaaccaaccagccggtcccacaaatgcttttgagtgccttgttaatggtagt

SEQ ID NO: 19738 - DNA, 80 bp, synthetic construct
  misc_feature 1..80: note = Synthetic: >MF094686_1-cand-230-309
  source 1..80: mol_type = other DNA
aatgcttttgagtgccttgttaatggtagttttccttcctctcagtataggggttacatgtttggtgttacgtggtataa

SEQ ID NO: 19739 - DNA, 80 bp, synthetic construct
  misc_feature 1..80: note = Synthetic: >MF094686_1-cand-320-399
  source 1..80: mol_type = other DNA
cgtattatttttcctcctactatttttgagttacagctcgatggattgcaatgggagtatgtacaatttactgggcctgt

SEQ ID NO: 19740 - DNA, 80 bp, synthetic construct
  misc_feature 1..80: note = Synthetic: >MF094686_1-cand-410-489
  source 1..80: mol_type = other DNA
cgcatgactaagtttaatgttgttaaagacatttctagcgtgcttgtttctactgatgcctcaggttctgtttaccgcta

SEQ ID NO: 19741 - DNA, 80 bp, synthetic construct
  misc_feature 1..80: note = Synthetic: >MF094686_1-cand-500-579
  source 1..80: mol_type = other DNA
gctgatggctttgttaatgccttacaatgcaagcttgttagtttcgatttgcaaccaggcatttattctaacagtgaggt

SEQ ID NO: 19742 - DNA, 80 bp, synthetic construct
  misc_feature 1..80: note = Synthetic: >MF094686_1-cand-590-669
  source 1..80: mol_type = other DNA
accgccttatatactgttgttcataatttaactgactgtcctcagaaacctgctagttcttgctataatggtcattgccc

SEQ ID NO: 19743 - DNA, 80 bp, synthetic construct
  misc_feature 1..80: note = Synthetic: >MF113046_1-cand-40-119
  source 1..80: mol_type = other DNA
taaacaagttttgcgtttactgctggctattgtgttagtatggggtttgtttagctgttataatggctacacacccacat

SEQ ID NO: 19744 - DNA, 80 bp, synthetic construct
  misc_feature 1..80: note = Synthetic: >MF113046_10-cand-0-79
  source 1..80: mol_type = other DNA
acaaaaactactattgacgcttcagctactattggtgttcaattaggttctaaggtggttttgaatgaacaggactgttc

SEQ ID NO: 19745 - DNA, 80 bp, synthetic construct
  misc_feature 1..80: note = Synthetic: >MF113046_10-cand-90-169
  source 1..80: mol_type = other DNA
ccagatctgtcaatggctcaagctacaattacaaaagtagctgatgttgattggtatggtcattatggctttgagaatgc

SEQ ID NO: 19746 - DNA, 80 bp, synthetic construct
  misc_feature 1..80: note = Synthetic: >MF113046_10-cand-150-229
  source 1..80: mol_type = other DNA
cattatggctttgagaatgctgctgtttttagtgagtctgatcattcagtttacaagtttgagagtgccattgttaatga

SEQ ID NO: 19747 - DNA, 80 bp, synthetic construct
  misc_feature 1..80: note = Synthetic: >MF113046_10-cand-240-319
  source 1..80: mol_type = other DNA
tttaagcagagtgataacaattgctgggttaatgctttgtgtttgttgttgcaggattataaacctagttggcggttccc

SEQ ID NO: 19748 - DNA, 80 bp, synthetic construct
  misc_feature 1..80: note = Synthetic: >MF113046_10-cand-330-409
  source 1..80: mol_type = other DNA
gacctttggtctaaatttgttagtggtaacacagatccttttgtgcacttgttgtattttatcactggcgctactaaagg

SEQ ID NO: 19749 - DNA, 80 bp, synthetic construct
  misc_feature 1..80: note = Synthetic: >MF113046_10-cand-420-499
  source 1..80: mol_type = other DNA
gatgtggagcttgcacttcacaaattagaaccgttactgtgctctaatgggtctgtcacgttggacgaatttagtggttg

SEQ ID NO: 19750 - DNA, 80 bp, synthetic construct
  misc_feature 1..80: note = Synthetic: >MF113046_10-cand-510-589
  source 1..80: mol_type = other DNA
tataatcgtagcactgtaagtggtcctatagttgcagcaccactacaaactctaggtgataaggcagtttgtagacatgg

SEQ ID NO: 19751 - DNA, 80 bp, synthetic construct
  misc_feature 1..80: note = Synthetic: >MF113046_10-cand-600-679
  source 1..80: mol_type = other DNA
acaacacgagttcataaaattcaaggttctgttattttgacatctattaatggttctgtcacagattgtttgaaaggtga

SEQ ID NO: 19752 - DNA, 80 bp, synthetic construct
  misc_feature 1..80: note = Synthetic: >MF113046_10-cand-780-859
  source 1..80: mol_type = other DNA
gaccttagtgttacctcagttttaatttcaaatggttacaccgttccagtggtgcaatcgcctacaattactagagacct

SEQ ID NO: 19753 - DNA, 80 bp, synthetic construct
  misc_feature 1..80: note = Synthetic: >MF113046_11-cand-0-79
  source 1..80: mol_type = other DNA
ccttggtttgtcaagaaatgtggtgctttgtttgagacagcatggaagtctatttgtaaatttctaagtgctggtggttt

SEQ ID NO: 19754 - DNA, 80 bp, synthetic construct
  misc_feature 1..80: note = Synthetic: >MF113046_11-cand-70-149
  source 1..80: mol_type = other DNA
ctggtggtttcacttatgtagctataagggataccatcaatgcaatttgttcaatttgttttactattaaggactcaaaa

SEQ ID NO: 19755 - DNA, 80 bp, synthetic construct
  misc_feature 1..80: note = Synthetic: >MF113046_11-cand-150-229
  source 1..80: mol_type = other DNA
cctgtgtttatagtttctagtgctgcatctagtcttgttaagacgtgtgtgcagtttcttgaatcggcttttgacatctt

SEQ ID NO: 19756 - DNA, 80 bp, synthetic construct
  misc_feature 1..80: note = Synthetic: >MF113046_11-cand-230-309
  source 1..80: mol_type = other DNA
cactcagacagttgaggttgtcggaattacttgcaaatgcgttgttcttggttgcaagtacttactttttgacaatgctc

SEQ ID NO: 19757 - DNA, 80 bp, synthetic construct
  misc_feature 1..80: note = Synthetic: >MF113046_11-cand-310-389
  source 1..80: mol_type = other DNA
tcgtcatgcttaaggatttaaaacttaaaggtaagcgcgaggccggtttaaacactgctacatttgcgtctgctattatt

SEQ ID NO: 19758 - DNA, 80 bp, synthetic construct
  misc_feature 1..80: note = Synthetic: >MF113046_11-cand-390-469
  source 1..80: mol_type = other DNA
ggtggcactgcagaagtcaatcctactcgttttgaaaaatcaactgcaaacttgacacttgttaatgatgttgtaaaacc

SEQ ID NO: 19759 - DNA, 80 bp, synthetic construct
  misc_feature 1..80: note = Synthetic: >MF113046_11-cand-470-549
  source 1..80: mol_type = other DNA
tggacaaggctatgctgttgttataggcggtatggctttttattgtactggtgagtattattttatgatgtcatcaccta

SEQ ID NO: 19760 - DNA, 80 bp, synthetic construct
  misc_feature 1..80: note = Synthetic: >MF113046_11-cand-550-629
  source 1..80: mol_type = other DNA
ctagtgttattacaacatctgtttttaaagcgtctacatacaacgcattttgtttgcgttacgatgtggaggacccttac

SEQ ID NO: 19761 - DNA, 80 bp, synthetic construct
  misc_feature 1..80: note = Synthetic: >MF113046_11-cand-620-699
  source 1..80: mol_type = other DNA
ggacccttacaaaacaaagatacaagcaaagtttggcacagtgtactctgttaatggttgtgctgatgatgcagttgaat

SEQ ID NO: 19762 - DNA, 80 bp, synthetic construct
  misc_feature 1..80: note = Synthetic: >MF113046_11-cand-700-779
  source 1..80: mol_type = other DNA
ctcttaatgtggctctgaaagaattctacagcaacggtgtgtgctttaaagcttatgcagataaagacatcatcgttata

SEQ ID NO: 19763 - DNA, 80 bp, synthetic construct
  misc_feature 1..80: note = Synthetic: >MF113046_11-cand-860-939
  source 1..80: mol_type = other DNA
aggtgaacctggctttttcaacaagtataaaaagctagaggcgcttgaggatgtttatgacagtgatgactacaagaact

SEQ ID NO: 19764 - DNA, 80 bp, synthetic construct
  misc_feature 1..80: note = Synthetic: >MF113046_11-cand-940-1019
  source 1..80: mol_type = other DNA
tgttgtgtcctaaagttttgtttaggttggataatggtattatatggtacagacatatcaggagtgttagaaactgtaaa

SEQ ID NO: 19765 - DNA, 80 bp, synthetic construct
  misc_feature 1..80: note = Synthetic: >MF113046_11-cand-1020-1099
  source 1..80: mol_type = other DNA
attacacatgtaacgtgtacttttacaggtggaattctcaagttgttgttagatggctacgatgctcttgccggtatgat

SEQ ID NO: 19766 - DNA, 80 bp, synthetic construct
  misc_feature 1..80: note = Synthetic: >MF113046_11-cand-1100-1179
  source 1..80: mol_type = other DNA
aactcgcagttatcagcaactttgcaaggcaaagccatttaagcttgatatcgctggcattactgtgagtggttttacaa

SEQ ID NO: 19767 - DNA, 80 bp, synthetic construct
  misc_feature 1..80: note = Synthetic: >MF113046_11-cand-1180-1259
  source 1..80: mol_type = other DNA
caccaattggtcgagatttcctggattttggtgaggatgtcgtagagatcttttgtggtggtgaaacacgctgcttttca

SEQ ID NO: 19768 - DNA, 80 bp, synthetic construct
  misc_feature 1..80: note = Synthetic: >MF113046_11-cand-1260-1339
  source 1..80: mol_type = other DNA
ggcgctagcgttcctgtcaatgttgataagattattgaagatgatgtttggtctacaactattttggaagaaactgagta

SEQ ID NO: 19769 - DNA, 80 bp, synthetic construct
  misc_feature 1..80: note = Synthetic: >MF113046_11-cand-1350-1429
  source 1..80: mol_type = other DNA
aaggatggaggtgttgtagtagttatagctggttacacattctatactaacaaccacgaacagttttacccctttggtga

SEQ ID NO: 19770 - DNA, 80 bp, synthetic construct
  misc_feature 1..80: note = Synthetic: >MF113046_11-cand-1440-1519
  source 1..80: mol_type = other DNA
gtccagaaattgtacaacaaagctggtggcgatgttaaaaatgtgacttttagtgataccgtggatgtcagagaagttga

SEQ ID NO: 19771 - DNA, 80 bp, synthetic construct
  misc_feature 1..80: note = Synthetic: >MF113046_11-cand-1520-1599
  source 1..80: mol_type = other DNA
tcctgtttttcatgtaaaaatcacatacgagtttgatgatgacaccattactaatgttttgaaaacagttgttggtacca

SEQ ID NO: 19772 - DNA, 80 bp, synthetic construct
  misc_feature 1..80: note = Synthetic: >MF113046_11-cand-1600-1679
  source 1..80: mol_type = other DNA
gtgttacaatagaaggtaataactgggagactttagatgacaccctgacagaaaaggttgatgctgtgttttcacaattg

SEQ ID NO: 19773 - DNA, 80 bp, synthetic construct
  misc_feature 1..80: note = Synthetic: >MF113046_11-cand-1680-1759
  source 1..80: mol_type = other DNA
caacaagctgggattgagctaccatcatattatatatatgattgtgctggcggtttcgatgttggttgcaatgatggtat

SEQ ID NO: 19774 - DNA, 80 bp, synthetic construct
  misc_feature 1..80: note = Synthetic: >MF113046_11-cand-1770-1849
  source 1..80: mol_type = other DNA
cagtatgatatttgttctgacacacccctagaaaatgttgaagaagttagtgatgctgatgttactaatgatgcaccaat

SEQ ID NO: 19775 - DNA, 80 bp, synthetic construct
  misc_feature 1..80: note = Synthetic: >MF113046_11-cand-1850-1929
  source 1..80: mol_type = other DNA
tgctgacaatgtgtcagaggtttcagatgagcctcagattgttgaatgtgtcagtgaagatattgaagaagttgttgatg

SEQ ID NO: 19776 - DNA, 80 bp, synthetic construct
  misc_feature 1..80: note = Synthetic: >MF113046_11-cand-1930-2009
  source 1..80: mol_type = other DNA
atattgtttctgatgtggatgatgaaaccagcacagcagatgacatcgtgtcaccattcgcatttccgaatagtatgatt

SEQ ID NO: 19777 - DNA, 80 bp, synthetic construct
  misc_feature 1..80: note = Synthetic: >MF113046_11-cand-2020-2099
  source 1..80: mol_type = other DNA
ttgtgcttaaacaacatcagaacaattgctggcttaacgctgcgggttaccaattacagtgtttgaaggtgttagaagat

SEQ ID NO: 19778 - DNA, 80 bp, synthetic construct
  misc_feature 1..80: note = Synthetic: >MF113046_11-cand-2100-2179
  source 1..80: mol_type = other DNA
gactctttcaaacaatactgtgcaggtgacgttgcaacgtttgtgcagttgatgtatgctgttaccaatagaaatattgg

SEQ ID NO: 19779 - DNA, 80 bp, synthetic construct
  misc_feature 1..80: note = Synthetic: >MF113046_11-cand-2180-2259
  source 1..80: mol_type = other DNA
tgatcttggtgaagctgagtatgttttagagcaacttcttggtagtgctcaaactgctaaagtgaagttgtcagctctat

SEQ ID NO: 19780 - DNA, 80 bp, synthetic construct
  misc_feature 1..80: note = Synthetic: >MF113046_11-cand-2260-2339
  source 1..80: mol_type = other DNA
gtaaatgtggcactatggaagaagtcattcctggttgtgtttttagaatgcactgtactagtgccacttttgactatggt

SEQ ID NO: 19781 - DNA, 80 bp, synthetic construct
  misc_feature 1..80: note = Synthetic: >MF113046_11-cand-2340-2419
  source 1..80: mol_type = other DNA
gtttgtggtgtttgtaaagatgttaagaagacaaccatagttggagttgaaggtactggtgtctttgtacatgaccccgc

SEQ ID NO: 19782 - DNA, 80 bp, synthetic construct
  misc_feature 1..80: note = Synthetic: >MF113046_11-cand-2420-2499
  source 1..80: mol_type = other DNA
taattacaaaccacttgttaagcctgtttgtaaagcaatttttaaaggttcgacaacaggaggtcactatatggtgcatg

SEQ ID NO: 19783 - DNA, 80 bp, synthetic construct
  misc_feature 1..80: note = Synthetic: >MF113046_2-cand-40-119
  source 1..80: mol_type = other DNA
agggctatctacaatttgaaaatcaaaaatgcaagcacaaatagttgtaattctttctcttctagctcttgttttaggaa

SEQ ID NO: 19784 - DNA, 80 bp, synthetic construct
  misc_feature 1..80: note = Synthetic: >MF113046_3-cand-40-119
  source 1..80: mol_type = other DNA
cttactttaatatggcaccctggtggattcttgttagttatgtgataatgttcctttatgactctttaccatccttcttt

SEQ ID NO: 19785 - DNA, 80 bp, synthetic construct
  misc_feature 1..80: note = Synthetic: >MF113046_4-cand-30-109
  source 1..80: mol_type = other DNA
tttcgttgcacagttgtttaataattggctgtcttattacggtttggtcaattatagttggtttttaaacatggtttact

SEQ ID NO: 19786 - DNA, 80 bp, synthetic construct
  misc_feature 1..80: note = Synthetic: >MF113046_5-cand-0-79
  source 1..80: mol_type = other DNA
aattgctaggtaaacctataaaactagtaaatagagatctcatacaatcgttgacagttgatttcaatggtgttctgtta

SEQ ID NO: 19787 - DNA, 80 bp, synthetic construct
  misc_feature 1..80: note = Synthetic: >MF113046_5-cand-70-149
  source 1..80: mol_type = other DNA
tgttctgttagaagcacataaacgcgttgttggtaactccttcaatgttgatgtttctaattgtaaaactttacgtgagt

SEQ ID NO: 19788 - DNA, 80 bp, synthetic construct
  misc_feature 1..80: note = Synthetic: >MF113046_6-cand-0-79
  source 1..80: mol_type = other DNA
cacgggtaacattaagttttacagaggtgatgttaagtctcttgttgaaaccatcaaacctaaagtattggttaatgcag

SEQ ID NO: 19789 - DNA, 80 bp, synthetic construct
  misc_feature 1..80: note = Synthetic: >MF113046_6-cand-100-179
  source 1..80: mol_type = other DNA
aaaggtggtgttgctaaagccatagatgactacacaaaaggtgctcttactagggaatctgttgaatacttcaaacagta

SEQ ID NO: 19790 - DNA, 80 bp, synthetic construct
  misc_feature 1..80: note = Synthetic: >MF113046_7-cand-0-79
  source 1..80: mol_type = other DNA
gtgctgatggtaagcctgttcgtcaaggtgagatgaaggactactttggtgacctagaggatattgttattgatggcatt

SEQ ID NO: 19791 - DNA, 80 bp, synthetic construct
  misc_feature 1..80: note = Synthetic: >MF113046_7-cand-110-189
  source 1..80: mol_type = other DNA
gatatggaagtccctcatgctaaacagactgctcttactattcagtctataatgtatcttatggatgtagaccataagat

SEQ ID NO: 19792 - DNA, 80 bp, synthetic construct
  misc_feature 1..80: note = Synthetic: >MF113046_8-cand-0-79
  source 1..80: mol_type = other DNA
ttggacttgtgaacaaaacatttgtcacattaccagctaattttgaccatgtgtacattaatattactggtaatgttaga

SEQ ID NO: 19793 - DNA, 80 bp, synthetic construct
  misc_feature 1..80: note = Synthetic: >MF113046_8-cand-130-209
  source 1..80: mol_type = other DNA
aagttttcaaggttgtgttgcagcctcacaattcacagttaatttaaaccatacttgcacaataactaatggtggtaatg

SEQ ID NO: 19794 - DNA, 80 bp, synthetic construct
  misc_feature 1..80: note = Synthetic: >MF113046_8-cand-260-339
  source 1..80: mol_type = other DNA
tgtccatttgcttttgaccgccttaataatcatatgtcttttgataaattgtgtttctcaaccgtgccgttgggtgatga

SEQ ID NO: 19795 - DNA, 80 bp, synthetic construct
  misc_feature 1..80: note = Synthetic: >MF113046_8-cand-310-389
  source 1..80: mol_type = other DNA
gtgtttctcaaccgtgccgttgggtgatgattgccgtttagacttgactgttgcaactcgatattttactggtgtgtttg

SEQ ID NO: 19796 - DNA, 80 bp, synthetic construct
  misc_feature 1..80: note = Synthetic: >MF113046_9-cand-0-79
  source 1..80: mol_type = other DNA
aagttgttttaggtgattacttccctactgtagaacaatggcacaattgtttacttgaacaaaccgatagtactgttatt

SEQ ID NO: 19797 - DNA, 80 bp, synthetic construct
  misc_feature 1..80: note = Synthetic: >MF113046_9-cand-120-199
  source 1..80: mol_type = other DNA
gttatgtcagtgttaagcgtttcttagcagtggcagtctatggaagtccttactctgtcagtgtgtatttcacacaagac

SEQ ID NO: 19798 - DNA, 80 bp, synthetic construct
  misc_feature 1..80: note = Synthetic: >MF113046_9-cand-240-319
  source 1..80: mol_type = other DNA
gcatgccacaacctacacaaatttcaggtcacgagtcgtgttggggttctgattgtaaaattaacacctattttcccatt

SEQ ID NO: 19799 - DNA, 80 bp, synthetic construct
  misc_feature 1..80: note = Synthetic: >MF577027_1-cand-130-209
  source 1..80: mol_type = other DNA
caagtgtttgattctaataaatatcaactctatctttatagggacaaccagaacacatatacaaccgcacagctccgtat

SEQ ID NO: 19800 - DNA, 80 bp, synthetic construct
  misc_feature 1..80: note = Synthetic: >MF577027_1-cand-220-299
  source 1..80: mol_type = other DNA
agtcagcaagttaatcttacctctccaagtggaccatcaaaagctagggactgtctttttgataaaaaaattcctcttgt

SEQ ID NO: 19801 - DNA, 80 bp, synthetic construct
  misc_feature 1..80: note = Synthetic: >MF577027_1-cand-310-389
  source 1..80: mol_type = other DNA
agacagaatattgtcattggcatgacatgggttggtgatagacttacagtctttgcaaaaaagattctagtcttcaatct

SEQ ID NO: 19802 - DNA, 80 bp, synthetic construct
  misc_feature 1..80: note = Synthetic: >MF577027_1-cand-400-479
  source 1..80: mol_type = other DNA
aattggtctttagtggcttctaagtgctttcacacaagtagctgtgctatgcagttcccctctcagcaaattttttacag

SEQ ID NO: 19803 - DNA, 80 bp, synthetic construct
  misc_feature 1..80: note = Synthetic: >MF577027_1-cand-490-569
  source 1..80: mol_type = other DNA
agcgctgagggcttagttacacctaccttgtgtgtttctactgattgccatgacttagctactaacgtttttgcagttca

SEQ ID NO: 19804 - DNA, 80 bp, synthetic construct
  misc_feature 1..80: note = Synthetic: >MF577027_1-cand-580-659
  source 1..80: mol_type = other DNA
ctgattcctccatccttcagctttaataactggtttgtgttaactaattctagtaccctaatctcaggtactattgtttc

SEQ ID NO: 19805 - DNA, 80 bp, synthetic construct
  misc_feature 1..80: note = Synthetic: >MF577027_1-cand-670-749
  source 1..80: mol_type = other DNA
atgcttctaagctgtttgtgggcggtgcctaaatttcagggtactggtaagacagtttggtttaatagtactgctgcaga

SEQ ID NO: 19806 - DNA, 80 bp, synthetic construct
  misc_feature 1..80: note = Synthetic: >MF577027_1-cand-760-839
  source 1..80: mol_type = other DNA
tattcgtcgaacgcatcttttgatgttcttcgttttaaccttaatggtactgctagcccatttaatggcaatcgtagttc

SEQ ID NO: 19807 - DNA, 80 bp, synthetic construct
  misc_feature 1..80: note = Synthetic: >MF577027_2-cand-100-179
  source 1..80: mol_type = other DNA
tttgtcactttgccagcttttaaaaaccacgcatatttgaatgtgagtgtcaatgctagctggaatgagcaaacctatcc

SEQ ID NO: 19808 - DNA, 80 bp, synthetic construct
  misc_feature 1..80: note = Synthetic: >MF577027_2-cand-180-259
  source 1..80: mol_type = other DNA
accgactctttcacaggttaatgttagcataaacgacgtacatactttctgtgttcaaacgtcacagtttaccactaagg

SEQ ID NO: 19809 - DNA, 80 bp, synthetic construct
  misc_feature 1..80: note = Synthetic: >MF577027_2-cand-270-349
  source 1..80: mol_type = other DNA
tgtttcgtccaattatggacacactgctcattcttatgacggtgattgtccttttcactttggctctcttaataattatc

SEQ ID NO: 19810 - DNA, 80 bp, synthetic construct
  misc_feature 1..80: note = Synthetic: >MF577027_2-cand-360-439
  source 1..80: mol_type = other DNA
taaactgtgtatttcaacacagtctattgatagtaggtgtgccattaaactcttcttatatccagctggtaatggtcctg

SEQ ID NO: 19811 - DNA, 80 bp, synthetic construct
  misc_feature 1..80: note = Synthetic: >MF577027_2-cand-440-519
  source 1..80: mol_type = other DNA
gttttcttgccaccaccttctacttttcatatatggatggtgagtttataacaggcacaccccaacctttagagggtgta

SEQ ID NO: 19812 - DNA, 80 bp, synthetic construct
  misc_feature 1..80: note = Synthetic: >MF577027_2-cand-530-609
  source 1..80: mol_type = other DNA
ccttctttaccactggtgtttgctcacgctacaccatttatggtatcaaaggggatggtgttattaatttggcaaatgat

SEQ ID NO: 19813 - DNA, 80 bp, synthetic construct
  misc_feature 1..80: note = Synthetic: >MF577027_2-cand-620-699
  source 1..80: mol_type = other DNA
ctggtctctattatacttcttccagtggacaattgctagctttcaagaatgttactactggtcaaatatactccgtcaca

SEQ ID NO: 19814 - DNA, 80 bp, synthetic construct
  misc_feature 1..80: note = Synthetic: >MF577027_2-cand-710-789
  source 1..80: mol_type = other DNA
tctcacagcaagcagctttcgttgatggacgaattgttggtgtgctgtctagctcagctaatactactttcaacaacact

SEQ ID NO: 19815 - DNA, 80 bp, synthetic construct
  misc_feature 1..80: note = Synthetic: >MF577027_2-cand-800-879
  source 1..80: mol_type = other DNA
ctagtttttactatcacagtaacacaaacgacagttgtgccgatcctgtgcttgtgtatagtaattttggagtctgcaag

SEQ ID NO: 19816 - DNA, 80 bp, synthetic construct
  misc_feature 1..80: note = Synthetic: >MF577027_2-cand-890-969
  source 1..80: mol_type = other DNA
taacttatgttgaacctaaggagtctcaacctagagtcgtacctatgtttgttggtaatattagcatacctatgaatttt

SEQ ID NO: 19817 - DNA, 80 bp, synthetic construct
  misc_feature 1..80: note = Synthetic: >MF593268_1-cand-40-119
  source 1..80: mol_type = other DNA
tgatgacggttgggctgcagctgttgaagaagcattcccccttgatgaatctgaagaagtttctgttgaggttgtgtgcg

SEQ ID NO: 19818 - DNA, 80 bp, synthetic construct
  misc_feature 1..80: note = Synthetic: >MF593268_2-cand-0-79
  source 1..80: mol_type = other DNA
tgggtttccacgaaacaaatgacactgttgaagagtgcaatctttctttgggacaatcactctgtgccatacctcctaac

SEQ ID NO: 19819 - DNA, 80 bp, synthetic construct
  misc_feature 1..80: note = Synthetic: >MF593268_2-cand-220-299
  source 1..80: mol_type = other DNA
tattgagactagcatacagaagattacagttgactgtaagcagtatgtatgtaatggttttgctaagtgtgagaaactgc

SEQ ID NO: 19820 - DNA, 80 bp, synthetic construct
  misc_feature 1..80: note = Synthetic: >MF593268_2-cand-310-389
  source 1..80: mol_type = other DNA
tggtcagttttgctcaaaaattaatcaagctcttcatggtgctaatttgcgccaagatgactcagttcgcaacttgtttg

SEQ ID NO: 19821 - DNA, 80 bp, synthetic construct
  misc_feature 1..80: note = Synthetic: >MF593268_2-cand-400-479
  source 1..80: mol_type = other DNA
aacacctcagacagttcctcttactacaggctttggtggtgaattcaacctcactctccttgagccgctttctgtttcta

SEQ ID NO: 19822 - DNA, 80 bp, synthetic construct
  misc_feature 1..80: note = Synthetic: >MF593268_3-cand-0-79
  source 1..80: mol_type = other DNA
attgacatgaataaagccgacggtgtcatttacccaaatggccgcacttattcaaatattacattacagactacaaatct

SEQ ID NO: 19823 - DNA, 80 bp, synthetic construct
  misc_feature 1..80: note = Synthetic: >MF593268_3-cand-80-159
  source 1..80: mol_type = other DNA
gtttcctaaaaatggtgacctaggcactcaatatgtctactcaccatctaatcataaaagcaacactaatgatgctttta

SEQ ID NO: 19824 - DNA, 80 bp, synthetic construct
  misc_feature 1..80: note = Synthetic: >MF593268_3-cand-160-239
  source 1..80: mol_type = other DNA
ttagtaattattcctactatggcaatccatttggcgatggaattgtcatacgtataggtcaaaatgctaataagactggc

SEQ ID NO: 19825 - DNA, 80 bp, synthetic construct
  misc_feature 1..80: note = Synthetic: >MF593268_3-cand-390-469
  source 1..80: mol_type = other DNA
gtcttccaagttgcatattgtttacttcagcctcgcactgagtctatgtgtccaggcaatagtaactatgttagttactt

SEQ ID NO: 19826 - DNA, 80 bp, synthetic construct
  misc_feature 1..80: note = Synthetic: >MF593268_3-cand-470-549
  source 1..80: mol_type = other DNA
tttagccgattcacctagtgattgttcttccacttctgatgaaatacgcagaaatgggttacgcgacattagaaaattct

SEQ ID NO: 19827 - DNA, 80 bp, synthetic construct
  misc_feature 1..80: note = Synthetic: >MF593268_3-cand-710-789
  source 1..80: mol_type = other DNA
catatatgataagcttaattactatacagtaataccgcgctccgtcatacaaccgtccaatcagcgagatgcttgggctg

SEQ ID NO: 19828 - DNA, 80 bp, synthetic construct
  misc_feature 1..80: note = Synthetic: >MF593268_3-cand-870-949
  source 1..80: mol_type = other DNA
tgtgggtataatgattatacccagcttatctgttcgtatggtgattttaatatgaagtctggtgtgtactcaacctcata

SEQ ID NO: 19829 - DNA, 80 bp, synthetic construct
  misc_feature 1..80: note = Synthetic: >MF593268_3-cand-1110-1189
  source 1..80: mol_type = other DNA
caagttgacgagtttgtatgtgataagattacacccgaagctcttgcaactgggtgttattcttctttaactgtcgattg

SEQ ID NO: 19830 - DNA, 80 bp, synthetic construct
  misc_feature 1..80: note = Synthetic: >MG021451_1-cand-40-119
  source 1..80: mol_type = other DNA
tttagtacacatgacccaatctacaaaaatggtgccatgtttcatggcaaaccagtactttgggttactaatggtaattt

SEQ ID NO: 19831 - DNA, 80 bp, synthetic construct
  misc_feature 1..80: note = Synthetic: >MG021451_2-cand-0-79
  source 1..80: mol_type = other DNA
ttctgaactgttgttggactgcgttgggttcacagcagcatcatgttattttgtggtgcgtctacttgaggataaagtgg

SEQ ID NO: 19832 - DNA, 80 bp, synthetic construct
  misc_feature 1..80: note = Synthetic: >MG021451_2-cand-140-219
  source 1..80: mol_type = other DNA
tttgttttgaggctactgcagcaactcttagtttcatttttgaccttgctcagttgtttaaggttttccttagacagact

SEQ ID NO: 19833 - DNA, 80 bp, synthetic construct
  misc_feature 1..80: note = Synthetic: >MG021451_2-cand-200-279
  source 1..80: mol_type = other DNA
aggttttccttagacagacttatgtctatacaacaactggttttgtagtagttggcggcaaggcttcacagcttactaaa

SEQ ID NO: 19834 - DNA, 80 bp, synthetic construct
  misc_feature 1..80: note = Synthetic: >MG021451_3-cand-0-79
  source 1..80: mol_type = other DNA
cttatcaaggactctttccaaaacagggagatttaggaaagcagtatgtttattcagcaggacatgctgataacaatata

SEQ ID NO: 19835 - DNA, 80 bp, synthetic construct
  misc_feature 1..80: note = Synthetic: >MG021451_3-cand-110-189
  source 1..80: mol_type = other DNA
attttcatttccaattacgcaaacgaaactgaactgtttgaaagcggtttcgttgtaagaattggtgctgctgcaaattc

SEQ ID NO: 19836 - DNA, 80 bp, synthetic construct
  misc_feature 1..80: note = Synthetic: >MG021451_4-cand-130-209
  source 1..80: mol_type = other DNA
gttagtgagtatcatgtaacattagctcttctgtgttgtagaccagatgcgcgttttcatgacttcactccgctcgcaaa

SEQ ID NO: 19837 - DNA, 80 bp, synthetic construct
  misc_feature 1..80: note = Synthetic: >MG021451_4-cand-240-319
  source 1..80: mol_type = other DNA
tgacttcaacatactaggtagaactctcgtgcttaacgcacatgagttacaccatcatatgagggtgcctattaatatgg

SEQ ID NO: 19838 - DNA, 80 bp, synthetic construct
  misc_feature 1..80: note = Synthetic: >MG021451_4-cand-350-429
  source 1..80: mol_type = other DNA
ttcatggttataccatacataacagtggccttcctcttcatttgtcagtgtctaagctgcatgatatagatgagagtact

SEQ ID NO: 19839 - DNA, 80 bp, synthetic construct
  misc_feature 1..80: note = Synthetic: >MG021451_4-cand-460-539
  source 1..80: mol_type = other DNA
actcagtatattacacgtatgactgccaagcctattgcgcttgagcttgtaaccatacgtggtaatcctaacaatcacaa

SEQ ID NO: 19840 - DNA, 80 bp, synthetic construct
  misc_feature 1..80: note = Synthetic: >MG021451_5-cand-0-79
  source 1..80: mol_type = other DNA
gtacaccaggttgctgctacaagaagcgtcacagttgaatacaacattcatgttgtgttagacgcattgcttgctaattc

SEQ ID NO: 19841 - DNA, 80 bp, synthetic construct
  misc_feature 1..80: note = Synthetic: >MG021451_5-cand-210-289
  source 1..80: mol_type = other DNA
gactttattgataatccctgctactgttttaaccgtgatggcgatgagcagtggggttctactatgatcttttctgttca

SEQ ID NO: 19842 - DNA, 80 bp, synthetic construct
  misc_feature 1..80: note = Synthetic: >MG021451_5-cand-300-379
  source 1..80: mol_type = other DNA
tgtgatgaacaagaagaggaagtggaagagcaggctgaagtacaacaatctgctgaagaatttgatgatagcactggtga

SEQ ID NO: 19843 - DNA, 80 bp, synthetic construct
  misc_feature 1..80: note = Synthetic: >MG021451_5-cand-400-479
  source 1..80: mol_type = other DNA
tagatgaagaatttccccttgaagaagaagttcaggaggagaagacttctatttcagtgctttgcaatgctgtagagcaa

SEQ ID NO: 19844 - DNA, 80 bp, synthetic construct
  misc_feature 1..80: note = Synthetic: >MG021451_5-cand-490-569
  source 1..80: mol_type = other DNA
tagaagtgtttgaagttaaaacttttgaaacacctgcaggtcagttttgtaccgagtctgttgtagatttacaacaggct

SEQ ID NO: 19845 - DNA, 80 bp, synthetic construct
  misc_feature 1..80: note = Synthetic: >MG021451_5-cand-590-669
  source 1..80: mol_type = other DNA
taaatgtgctcctgaattaactaagactgaagtagttgaaaattctgctccagttcctgtaaaggagtatgaagctgatg

SEQ ID NO: 19846 - DNA, 80 bp, synthetic construct
  misc_feature 1..80: note = Synthetic: >MG021452_1-cand-0-79
  source 1..80: mol_type = other DNA
acagcacatacgacccaatctacaaaaatggtgccatgcttaatggaaaaccagtactttgggtgactaatggaattttt

SEQ ID NO: 19847 - DNA, 80 bp, synthetic construct
  misc_feature 1..80: note = Synthetic: >MG021452_1-cand-100-179
  source 1..80: mol_type = other DNA
caacagagcatcgttgcgtcaaatctacgacccagctcctgtagaactagagaataagttcacaccattaattgtagagg

SEQ ID NO: 19848 - DNA, 80 bp, synthetic construct
  misc_feature 1..80: note = Synthetic: >MG021452_2-cand-0-79
  source 1..80: mol_type = other DNA
gacagacttatgtctatacaacaagtggatttgttgtagttggcggcaaggtttcacaacttactaagcaactccttgac

SEQ ID NO: 19849 - DNA, 80 bp, synthetic construct
  misc_feature 1..80: note = Synthetic: >MG021452_2-cand-110-189
  source 1..80: mol_type = other DNA
actaaggtctcttgggccggtgctaaagttagagctgttatctataacagcagggaatctcttgtattcccgacaggcac

SEQ ID NO: 19850 - DNA, 80 bp, synthetic construct
  misc_feature 1..80: note = Synthetic: >MG021452_3-cand-0-79
  source 1..80: mol_type = other DNA
tggcacctaataacatgtatatgagaacaacacacactgacttgggactgtatgttagcctgactctagtgttggcagtt

SEQ ID NO: 19851 - DNA, 80 bp, synthetic construct
  misc_feature 1..80: note = Synthetic: >MG021452_3-cand-120-199
  source 1..80: mol_type = other DNA
cacttgctttgtgcagttttgttatgtggatgtatacttatagtgttggtgaatattcttccccaattgcctacttaatt

SEQ ID NO: 19852 - DNA, 80 bp, synthetic construct
  misc_feature 1..80: note = Synthetic: >MG021452_4-cand-170-249
  source 1..80: mol_type = other DNA
acgcattggcgctgcggccaatgccacaggttctgttattatttccactgttcaaaaaactattaaaaagatctaccccg

SEQ ID NO: 19853 - DNA, 80 bp, synthetic construct
  misc_feature 1..80: note = Synthetic: >MG021452_4-cand-300-379
  source 1..80: mol_type = other DNA
cgctactttaaccatactctcttgttgttacctgacggttgtggtacaaggctttgggcattgtactgtgttattgaacc

SEQ ID NO: 19854 - DNA, 80 bp, synthetic construct
  misc_feature 1..80: note = Synthetic: >MG021452_5-cand-110-189
  source 1..80: mol_type = other DNA
tgtggaacaacctgttgaagaatttgaggatagcactggtgatgaagcctgggctacacttgttgacgaagaatttcctc

SEQ ID NO: 19855 - DNA, 80 bp, synthetic construct
  misc_feature 1..80: note = Synthetic: >MG021452_5-cand-210-289
  source 1..80: mol_type = other DNA
gaggaagaaattgttcctacattagaactttgcaatgctgtagagcaacgtattactgtggaagtgtttgaagctcaagc

SEQ ID NO: 19856 - DNA, 80 bp, synthetic construct
  misc_feature 1..80: note = Synthetic: >MG021452_5-cand-310-389
  source 1..80: mol_type = other DNA
aattctctactgcttctgttgtagaagtacacaaggcagttgtcgttactaaggacattaaagatgctcctgcattgcct

SEQ ID NO: 19857 - DNA, 80 bp, synthetic construct
  misc_feature 1..80: note = Synthetic: >MG021452_5-cand-410-489
  source 1..80: mol_type = other DNA
tccttcttcggcaaatcctgttaaggaatatgaagctgatgctgaaacttctgaacaagtagtagctaagcctaaaacac

SEQ ID NO: 19858 - DNA, 80 bp, synthetic construct
  misc_feature 1..80: note = Synthetic: >MG021452_5-cand-510-589
  source 1..80: mol_type = other DNA
aaggcagcctctggcagtgatagtgaatcctctgtggatcctctacaatcttttaagcacaaagtctgcactgatagtgt

SEQ ID NO: 19859 - DNA, 80 bp, synthetic construct
  misc_feature 1..80: note = Synthetic: >MG021452_5-cand-610-689
  source 1..80: mol_type = other DNA
ctatcaagttggctaagtgctataaagactctgtgttggttaacgctgcgaatacccatctgcaacatgcgggtggtatt

SEQ ID NO: 19860 - DNA, 80 bp, synthetic construct
  misc_feature 1..80: note = Synthetic: >MG021452_6-cand-0-79
  source 1..80: mol_type = other DNA
ttatgggctgtaggtcaccctgcacccacacactatcttcgtgttgtctttcccccgtccagaaactgggatgtcagatc

SEQ ID NO: 19861 - DNA, 80 bp, synthetic construct
  misc_feature 1..80: note = Synthetic: >MG021452_6-cand-80-159
  source 1..80: mol_type = other DNA
tggacatatgttagatgatgttcagaggtggcttgcaccttatggtgccaaacctgttactgagtatcatattactattg

SEQ ID NO: 19862 - DNA, 80 bp, synthetic construct
  misc_feature 1..80: note = Synthetic: >MG021452_6-cand-170-249
  source 1..80: mol_type = other DNA
ttgtaagccagatcagcaatttcataacttctcttacctcgcacacatgcttacagatgtagtgtttgagcttagtgatt

SEQ ID NO: 19863 - DNA, 80 bp, synthetic construct
  misc_feature 1..80: note = Synthetic: >MG021452_6-cand-260-339
  source 1..80: mol_type = other DNA
gggcagaacgttagttcttaatgctaatgaatgtcagcatcctaacatgactgtccatcatattaaggagtggcttagag

SEQ ID NO: 19864 - DNA, 80 bp, synthetic construct
  misc_feature 1..80: note = Synthetic: >MG021452_6-cand-480-559
  source 1..80: mol_type = other DNA
cctactgcgcttgagctcgttactatacgtggaactcctaacaatcctaagcagattgttcagtcaataccaatatttta

SEQ ID NO: 19865 - DNA, 80 bp, synthetic construct
  misc_feature 1..80: note = Synthetic: >MG021452_6-cand-570-649
  source 1..80: mol_type = other DNA
gctttttctttgtccctgtttcgaccgattcaactagttccggcttttccagaagctgaagttgcatctgacagtgactc

SEQ ID NO: 19866 - DNA, 80 bp, synthetic construct
  misc_feature 1..80: note = Synthetic: >MG021452_6-cand-660-739
  source 1..80: mol_type = other DNA
gttcctttcacatgcatttctactgttggttacagtgcagcgttagctgttaatgtgtgtcttattccactcatgttatg

SEQ ID NO: 19867 - DNA, 80 bp, synthetic construct
  misc_feature 1..80: note = Synthetic: >MG596802_1-cand-0-79
  source 1..80: mol_type = other DNA
ggattggatttgatgcaagccagccagattgttaaaatggtaactgtaccatatgtctgtttactggctaataaagaaca

SEQ ID NO: 19868 - DNA, 80 bp, synthetic construct
  misc_feature 1..80: note = Synthetic: >MG596802_2-cand-120-199
  source 1..80: mol_type = other DNA
acagaacaagaagatgcttggtctgttgctgttgatgaagctttccctctggaagaccagagtgaagaagttatagttca

SEQ ID NO: 19869 - DNA, 80 bp, synthetic construct
  misc_feature 1..80: note = Synthetic: >MG596802_2-cand-220-299
  source 1..80: mol_type = other DNA
taacgcttgatgtgcttgaagtcttgacttttgaagtacctggcgtttctattgtaaaagctaaacgctccactgagaaa

SEQ ID NO: 19870 - DNA, 80 bp, synthetic construct
  misc_feature 1..80: note = Synthetic: >MG596802_2-cand-320-399
  source 1..80: mol_type = other DNA
tttagaatgggatattaaacaatgtcccgctaaatctcaaacatctgatgtttatgaagcagatgctgaaattgttcagc

SEQ ID NO: 19871 - DNA, 80 bp, synthetic construct
  misc_feature 1..80: note = Synthetic: >MG596802_3-cand-130-209
  source 1..80: mol_type = other DNA
attgggtaagctatatgttagtaattattctcatgaagtcaacctctttcaagatggttttgttgtccgaattggtgctt

SEQ ID NO: 19872 - DNA, 80 bp, synthetic construct
  misc_feature 1..80: note = Synthetic: >MG596802_3-cand-330-409
  source 1..80: mol_type = other DNA
gttatatgaattataccttagttatcctacctgatggctgtggtacttatttaaggactttctattgtataatagaacct

SEQ ID NO: 19873 - DNA, 80 bp, synthetic construct
  misc_feature 1..80: note = Synthetic: >MG596802_4-cand-140-219
  source 1..80: mol_type = other DNA
gatgtgtcatcattttcagaattgttgttggaatgtgtaggtttcacaacagcatcagtatattttgtggcgcgtctact

SEQ ID NO: 19874 - DNA, 80 bp, synthetic construct
  misc_feature 1..80: note = Synthetic: >MG596802_4-cand-250-329
  source 1..80: mol_type = other DNA
catcttctcaaattgccagaaggctgttagtgctttcattactacgtgttttgaagctacaactgccactatcaattatc

SEQ ID NO: 19875 - DNA, 80 bp, synthetic construct
  misc_feature 1..80: note = Synthetic: >MG596802_4-cand-360-439
  source 1..80: mol_type = other DNA
tccttaaaaaggcctatatttacacatccacaggatttgtagcaataggcgggagagtgtccaatctcactaaacaactg

SEQ ID NO: 19876 - DNA, 80 bp, synthetic construct
  misc_feature 1..80: note = Synthetic: >MG596802_4-cand-470-549
  source 1..80: mol_type = other DNA
ctacatactaaaatctcatgggcaggtgctaaagttcatgctgttatttataatagtagagaagcacttgtcttttccac

SEQ ID NO: 19877 - DNA, 80 bp, synthetic construct
  misc_feature 1..80: note = Synthetic: >MG596802_5-cand-90-169
  source 1..80: mol_type = other DNA
atgttggtggttttattattatgggtaaaaccttagttttaaatgccaaagagttagtagacgggtatggtaacaccatg

SEQ ID NO: 19878 - DNA, 80 bp, synthetic construct
  misc_feature 1..80: note = Synthetic: >MG596802_5-cand-590-669
  source 1..80: mol_type = other DNA
gctgcattagccgtaaacgcatgtctcataccgtttctactttgtcttaatcaagacacttgtaggaatagtgttattaa

SEQ ID NO: 19879 - DNA, 80 bp, synthetic construct
  misc_feature 1..80: note = Synthetic: >MG596802_5-cand-680-759
  source 1..80: mol_type = other DNA
ctttatggcttgatgttatataattttgtgttagctgctatattagttagcagcacatttgtaccccttggcagttgtct

SEQ ID NO: 19880 - DNA, 80 bp, synthetic construct; identical to SEQ ID NO: 19867
  misc_feature 1..80: note = Synthetic: >MG596803_1-cand-0-79
  source 1..80: mol_type = other DNA

SEQ ID NO: 19881 - DNA, 80 bp, synthetic construct; identical to SEQ ID NO: 19868
  misc_feature 1..80: note = Synthetic: >MG596803_2-cand-120-199
  source 1..80: mol_type = other DNA

SEQ ID NO: 19882 - DNA, 80 bp, synthetic construct; identical to SEQ ID NO: 19869
  misc_feature 1..80: note = Synthetic: >MG596803_2-cand-220-299
  source 1..80: mol_type = other DNA

SEQ ID NO: 19883 - DNA, 80 bp, synthetic construct; identical to SEQ ID NO: 19870
  misc_feature 1..80: note = Synthetic: >MG596803_2-cand-320-399
  source 1..80: mol_type = other DNA

SEQ ID NO: 19884 - DNA, 80 bp, synthetic construct; identical to SEQ ID NO: 19871
  misc_feature 1..80: note = Synthetic: >MG596803_3-cand-130-209
  source 1..80: mol_type = other DNA

SEQ ID NO: 19885 - DNA, 80 bp, synthetic construct; identical to SEQ ID NO: 19872
  misc_feature 1..80: note = Synthetic: >MG596803_3-cand-330-409
  source 1..80: mol_type = other DNA

SEQ ID NO: 19886 - DNA, 80 bp, synthetic construct
  misc_feature 1..80: note = Synthetic: >MG596803_4-cand-140-219
  source 1..80: mol_type = other DNA
gatgtgtcatcattctcagaattgttgttggaatgtgtaggtttcacaacagcatcagtatattttgtagcgcgtctact

SEQ ID NO: 19887 - DNA, 80 bp, synthetic construct
  misc_feature 1..80: note = Synthetic: >MG596803_4-cand-250-329
  source 1..80: mol_type = other DNA
tattttctcaaattgccagaaggctgttagtgctttcattactacgtgttttgacgccacaactgccactatcaattatg

SEQ ID NO: 19888 - DNA, 80 bp, synthetic construct
  misc_feature 1..80: note = Synthetic: >MG596803_4-cand-360-439
  source 1..80: mol_type = other DNA
tccttaaaaaggcttatgtttacacatccatgggatttgtagcaataggcgggagagtttctaatcttactaaacaactg

SEQ ID NO: 19889 - DNA, 80 bp, synthetic construct
  misc_feature 1..80: note = Synthetic: >MG596803_4-cand-470-549
  source 1..80: mol_type = other DNA
ctacatactaaaatctcgtgggcaggcgctaaaatccgtgctgttatatataacagcagagacgcacttgtcttttccac

SEQ ID NO: 19890 - DNA, 80 bp, synthetic construct
  misc_feature 1..80: note = Synthetic: >MG596803_5-cand-0-79
  source 1..80: mol_type = other DNA
tgcaggttttgtagggcaagctgttaacagcagtaaagcattagctaagcaagatgcagccagacaagttgcctgggaat

SEQ ID NO: 19891 - DNA, 80 bp, synthetic construct
  misc_feature 1..80: note = Synthetic: >MG596803_5-cand-80-159
  source 1..80: mol_type = other DNA
tgcatcgggaagggaagcttaacggcttcaagcttcgatggtgtcacccgttttaggaagcgccgtcattctcctcctac

SEQ ID NO: 19892 - DNA, 80 bp, synthetic construct
  misc_feature 1..80: note = Synthetic: >MG596803_5-cand-160-239
  source 1..80: mol_type = other DNA
aaaacagcgctatgttaagcgccgtttttctcctctaaagctagaagatattatggaagttgacacttctcaacctacac

SEQ ID NO: 19893 - DNA, 80 bp, synthetic construct
  misc_feature 1..80: note = Synthetic: >MG596803_5-cand-230-309
  source 1..80: mol_type = other DNA
caacctacacattaccttcggcttatatttcctagctacagacagtggcactgtaggtctggtcatttaattgatgaggt

SEQ ID NO: 19894 - DNA, 80 bp, synthetic construct
  misc_feature 1..80: note = Synthetic: >MG596803_5-cand-310-389
  source 1..80: mol_type = other DNA
tcagaactggttatccgcttttggcgatgttaaacctgttactgaatatcatcttactttgactcttctttgttgtacag

SEQ ID NO: 19895 - DNA, 80 bp, synthetic construct
  misc_feature 1..80: note = Synthetic: >MG596803_5-cand-470-549
  source 1..80: mol_type = other DNA
atgggtaaaactttagttttaaatgccaaagagttagtagacgggtatggtaataccatgtacgtcaatatggcagtccc

SEQ ID NO: 19896 - DNA, 80 bp, synthetic construct; identical to SEQ ID NO: 19878
  misc_feature 1..80: note = Synthetic: >MG596803_5-cand-950-1029
  source 1..80: mol_type = other DNA

SEQ ID NO: 19897 - DNA, 80 bp, synthetic construct; identical to SEQ ID NO: 19879
  misc_feature 1..80: note = Synthetic: >MG596803_5-cand-1040-1119
  source 1..80: mol_type = other DNA

SEQ ID NO: 19898 - DNA, 80 bp, synthetic construct
  misc_feature 1..80: note = Synthetic: >MG762674_1-cand-20-99
  source 1..80: mol_type = other DNA
gttagtgatacagagtctgtacaaagtgtggacgatgtagaacccgcctcagatagtgatgagcagtggctgggggatga

SEQ ID NO: 19899 - DNA, 80 bp, synthetic construct
  misc_feature 1..80: note = Synthetic: >MG762674_2-cand-0-79
  source 1..80: mol_type = other DNA
ggcgcatgcttggccgacgccagctcgtgtggactctccctgtgttgatggaaaaacccgacctgcttttgaaagtagcg

SEQ ID NO: 19900 - DNA, 80 bp, synthetic construct
  misc_feature 1..80: note = Synthetic: >MG762674_2-cand-80-159
  source 1..80: mol_type = other DNA
cgggttgttccactaacatccagtaatgttttagcttttgcatgtatatgctacatgcttttgcgtactgaaccttcttt

SEQ ID NO: 19901 - DNA, 80 bp, synthetic construct
  misc_feature 1..80: note = Synthetic: >MG762674_3-cand-0-79
  source 1..80: mol_type = other DNA
tcaagaatcttttactaccggatccgtacatagcttactccggccaagttttaaagcaacatttgcctactgctgacctg

SEQ ID NO: 19902 - DNA, 80 bp, synthetic construct
  misc_feature 1..80: note = Synthetic: >MG762674_4-cand-0-79
  source 1..80: mol_type = other DNA
atttgcatcccttacatccctttcgcctttcaggagacaggtttgtggaaagcttttcagaatgtgaccactcatgctgg

SEQ ID NO: 19903 - DNA, 80 bp, synthetic construct
  misc_feature 1..80: note = Synthetic: >MG762674_4-cand-50-129
  source 1..80: mol_type = other DNA
agcttttcagaatgtgaccactcatgctggtattagggtgcggttgttgtcttcttgttttaaaaatcattacgtatctg

SEQ ID NO: 19904 - DNA, 80 bp, synthetic construct
  misc_feature 1..80: note = Synthetic: >MG762674_4-cand-170-249
  source 1..80: mol_type = other DNA
gcacacccagcaaaagggtggtcttgtgcagcgcctttgcatacgttttattgagcctactgacttccagcctggttaca

SEQ ID NO: 19905 - DNA, 80 bp, synthetic construct
  misc_feature 1..80: note = Synthetic: >MG762674_5-cand-0-79
  source 1..80: mol_type = other DNA
ctatgaagctgctcactgtgtaccctaatacatccggtgatgttgtcgcagtgtccgatgataatgtaacagttcaccct

SEQ ID NO: 19906 - DNA, 80 bp, synthetic construct
  misc_feature 1..80: note = Synthetic: >MG762674_5-cand-50-129
  source 1..80: mol_type = other DNA
gtgtccgatgataatgtaacagttcacccttatggctcgctctatatgggtaaacctgttttatttgtaaataagccaaa

SEQ ID NO: 19907 - DNA, 80 bp, synthetic construct
  misc_feature 1..80: note = Synthetic: >MG762674_5-cand-180-259
  source 1..80: mol_type = other DNA
ctaatagttttagtgctttacctattgaacctttaccggctgatgaccacttgcaaagtactgtcacagtaaacgatact

SEQ ID NO: 19908 - DNA, 80 bp, synthetic construct
  misc_feature 1..80: note = Synthetic: >MG762674_6-cand-0-79
  source 1..80: mol_type = other DNA
ttacctgtaggtagtaatttaagacatgcacagtattttcaatccgttgtgcgtaatgattacgcagttgcggatggcaa

SEQ ID NO: 19909 - DNA, 80 bp, synthetic construct
  misc_feature 1..80: note = Synthetic: >MG762674_6-cand-80-159
  source 1..80: mol_type = other DNA
gtgtagggactttgatctaaatctatatatagcaccaattgtctataaagagttgttggtccagtattcaattaatggtt

SEQ ID NO: 19910 - DNA, 80 bp, synthetic construct
  misc_feature 1..80: note = Synthetic: >MG762674_6-cand-170-249
  source 1..80: mol_type = other DNA
tgctgctgagtgtgccaacagtgcttctgatgaattgtactgtgttacaggcacttttgaacctcagactggtgtttatg

SEQ ID NO: 19911 - DNA, 80 bp, synthetic construct
  misc_feature 1..80: note = Synthetic: >MG762674_6-cand-260-339
  source 1..80: mol_type = other DNA
ctaccgcgcgcaagtccaagggtttgtgcgtattacgcagcaggctgacgtctgtcaaccaccttatgctgccctagaaa

SEQ ID NO: 19912 - DNA, 80 bp, synthetic construct
  misc_feature 1..80: note = Synthetic: >MG762674_6-cand-350-429
  source 1..80: mol_type = other DNA
accagtggtttggcgtcgttatttagtgcgtgactgcgcatttgattttgcgactgttattaataatttgcctacatacc

SEQ ID NO: 19913 - DNA, 80 bp, synthetic construct
  misc_feature 1..80: note = Synthetic: >MG762674_6-cand-440-519
  source 1..80: mol_type = other DNA
ttatggtgtgtcacctagtaggttggcctctatgtgttacaacaccattactatagatgttatgcgtattaacactacac

SEQ ID NO: 19914 - DNA, 80 bp, synthetic construct
  misc_feature 1..80: note = Synthetic: >MG762674_6-cand-530-609
  source 1..80: mol_type = other DNA
tttgcttcagaaggtgcctgatgcgtttagcctttataattatgctataccatcagacttttatggttgtatacatgcat

SEQ ID NO: 19915 - DNA, 80 bp, synthetic construct
  misc_feature 1..80: note = Synthetic: >MG762674_6-cand-620-699
  source 1..80: mol_type = other DNA
tgttacggatacgtatgctatagcgactcagaggcgtatatcacctggtggccgtcaggatgactctttttatattaata

SEQ ID NO: 19916 - DNA, 80 bp, synthetic construct
  misc_feature 1..80: note = Synthetic: >MG762674_6-cand-820-899
  source 1..80: mol_type = other DNA
ttgtcacaaaccaatgcgtgcaatataacctttatggttacactggcactggtgttttaaatgccaccacggctataagt

SEQ ID NO: 19917 - DNA, 80 bp, synthetic construct
  misc_feature 1..80: note = Synthetic: >MG762674_6-cand-910-989
  source 1..80: mol_type = other DNA
ataaggtgttttctgcatctgacactggtgatattgtggctgtgcgtgttaatggcactgtttatactattagaccttgc

SEQ ID NO: 19918 - DNA, 80 bp, synthetic construct
  misc_feature 1..80: note = Synthetic: >MG762674_6-cand-1000-1079
  source 1..80: mol_type = other DNA
ctatatctgtaggttaccatgcaggttatgaacgtgctcttttatttaatggtcttagttgtgcagaccggacatctgct

SEQ ID NO: 19919 - DNA, 80 bp, synthetic construct
  misc_feature 1..80: note = Synthetic: >MG762674_6-cand-1090-1169
  source 1..80: mol_type = other DNA
cggcatccacttactggtctactgctagagctcagtctgcttccaattattatgacacaatttctggttgtgtctataat

SEQ ID NO: 19920 - DNA, 80 bp, synthetic construct
  misc_feature 1..80: note = Synthetic: >MG772933_1-cand-40-119
  source 1..80: mol_type = other DNA
accacttgaataccaagctacaagggttgttgttttgtcatttgagcttctaaatgcaccagctacagtttgtggaccaa

SEQ ID NO: 19921 - DNA, 80 bp, synthetic construct
  misc_feature 1..80: note = Synthetic: >MG772933_2-cand-0-79
  source 1..80: mol_type = other DNA
tctcaatctctcttgatagttaacaacgcaacgaatgttattatcaaggtttgtaattttgatttttgttatgatcccta

SEQ ID NO: 19922 - DNA, 80 bp, synthetic construct
  misc_feature 1..80: note = Synthetic: >MG772933_2-cand-120-199
  source 1..80: mol_type = other DNA
agagaatttgctgtctattcttcttatgctaattgtacttttgagtatgtttcgaaatcctttatgttgaacatttctgg

SEQ ID NO: 19923 - DNA, 80 bp, synthetic construct
  misc_feature 1..80: note = Synthetic: >MG772934_1-cand-0-79
  source 1..80: mol_type = other DNA
tctcaatctctcttgatagttaacaatgcaacgaatgttattatcaaggtttgtaattttgacttttgttacgatcccta

SEQ ID NO: 19924 - DNA, 80 bp, synthetic construct
  misc_feature 1..80: note = Synthetic: >MG772934_1-cand-60-139
  source 1..80: mol_type = other DNA
gacttttgttacgatccctaccttagtggttactatcataacaacaaaacctggagcatcagagaatttgctgtctattc

SEQ ID NO: 19925 - DNA, 80 bp, synthetic construct
  misc_feature 1..80: note = Synthetic: >MG772934_1-cand-170-249
  source 1..80: mol_type = other DNA
ctcaaaatcctttatgttgaacatttctggtaatggtggtctgttcaacactctcagagagtttgtttttagaaatgtcg

SEQ ID NO: 19926 - DNA, 80 bp, synthetic construct
  misc_feature 1..80: note = Synthetic: >MG772934_1-cand-280-359
  source 1..80: mol_type = other DNA
caccagtaaacttaaatcgtggcttacctactggtctttcagtacttcaaccgttggttgaattaccagttagcataaat

SEQ ID NO: 19927 - DNA, 80 bp, synthetic construct
  misc_feature 1..80: note = Synthetic: >MG812377_1-cand-40-119
  source 1..80: mol_type = other DNA
ggtgctataacttcaaccaacaaaactgtaagtgggtttacaaagattatacccacccctaccttttattactccactaa

SEQ ID NO: 19928 - DNA, 80 bp, synthetic construct
  misc_feature 1..80: note = Synthetic: >MG893511_3-cand-0-79
  source 1..80: mol_type = other DNA
acagaaactattctaggtggttatctaccctattgtggaaagggccttaattgtggatggtataactttgtataccaaca

SEQ ID NO: 19929 - DNA, 80 bp, synthetic construct
  misc_feature 1..80: note = Synthetic: >MG893511_3-cand-90-169
  source 1..80: mol_type = other DNA
gatgctaagtactcttatataaacactcaaaacttgaacatacccaatgttcatggtgtttattttgatgtacgtgagca

SEQ ID NO: 19930 - DNA, 80 bp, synthetic construct
  misc_feature 1..80: note = Synthetic: >MG893511_3-cand-180-259
  source 1..80: mol_type = other DNA
ggtgtgtgggaaaccagagatcgtgtcggcttattgatagctatacatggtacatcgcactacagtctattaatggtttt

SEQ ID NO: 19931 - DNA, 80 bp, synthetic construct
  misc_feature 1..80: note = Synthetic: >MG893511_3-cand-270-349
  source 1..80: mol_type = other DNA
gtagaagaaaatcagcctcacgttgctgttaaaatctgccactggaagccaggcaatataagctcatatcattcatttac

SEQ ID NO: 19932 - DNA, 80 bp, synthetic construct
  misc_feature 1..80: note = Synthetic: >MG893511_3-cand-360-439
  source 1..80: mol_type = other DNA
ggagatggaggccaatgtgtgtttaaccagaggttctcattagacaccaaattgacaactaatgatttttatggctttca

SEQ ID NO: 19933 - DNA, 80 bp, synthetic construct
  misc_feature 1..80: note = Synthetic: >MG893511_3-cand-450-529
  source 1..80: mol_type = other DNA
acttatgtggacatttatctaggtggtaccattactaaggtgtgggttgccaatgattggagtgtagtagaagccagtat

SEQ ID NO: 19934 - DNA, 80 bp, synthetic construct
  misc_feature 1..80: note = Synthetic: >MG893511_3-cand-620-699
  source 1..80: mol_type = other DNA
gaattacacacacttgcagttaaatgaatgcactagtgattattgtgccggttatgctaaaaacgtcttcgtgccagtag

SEQ ID NO: 19935 - DNA, 80 bp, synthetic construct
  misc_feature 1..80: note = Synthetic: >MG893511_3-cand-700-779
  source 1..80: mol_type = other DNA
acggtaaaataccagaaagtttttcttttagcaactggtttctgttatcagataaatccaccttagtgcaaggacgtgtt

SEQ ID NO: 19936 - DNA, 80 bp, synthetic construct
  misc_feature 1..80: note = Synthetic: >MG893511_3-cand-790-869
  source 1..80: mol_type = other DNA
agccagtctttgtacaatgtctaaggcctgtgccgtcgtggtctaacagtagtgctgtggtgtattttactaatgattct

SEQ ID NO: 19937 - DNA, 80 bp, synthetic construct
  misc_feature 1..80: note = Synthetic: >MG893511_3-cand-880-959
  source 1..80: mol_type = other DNA
acgttacggcagatgttttgcggttcaatttgaattttagtgacactgatgtttacaccaactcgaataacgacgagcag

SEQ ID NO: 19938 - DNA, 80 bp, synthetic construct
  misc_feature 1..80: note = Synthetic: >MG893511_3-cand-960-1039
  source 1..80: mol_type = other DNA
ttatacttcacttttgaagacaatacaaatgcatctatagcttgttatagcagtgctaatgttactgacttccagcctgc

SEQ ID NO: 19939 - DNA, 80 bp, synthetic construct
  misc_feature 1..80: note = Synthetic: >MG893511_3-cand-1040-1119
  source 1..80: mol_type = other DNA
aaataatataaactcccacataccctttggaacaaccgcgcaatcgtatttttgttttgccaatttctctaacgctgctg

SEQ ID NO: 19940 - DNA, 80 bp, synthetic construct
  misc_feature 1..80: note = Synthetic: >MG893511_3-cand-1230-1309
  source 1..80: mol_type = other DNA
aagagtgttaacttctccatcagttctattcaacgttatggcttctggactatagcttataccaactatacagatgtaat

SEQ ID NO: 19941 - DNA, 80 bp, synthetic construct
  misc_feature 1..80: note = Synthetic: >MG916901_1-cand-40-119
  source 1..80: mol_type = other DNA
gttccaggcgaagtttggcttcttaccgcgtaatagcaagtcatgccctataattgtaggcgtttctgatgcggcgcgtg

SEQ ID NO: 19942 - DNA, 80 bp, synthetic construct
  misc_feature 1..80: note = Synthetic: >MG916901_10-cand-0-79
  source 1..80: mol_type = other DNA
caccctggatggtttacatctgtggcgtgttgttaaacttcaaagtgtcaaaggctttgtggcctcggctaactttgaca

SEQ ID NO: 19943 - DNA, 80 bp, synthetic construct
  misc_feature 1..80: note = Synthetic: >MG916901_10-cand-270-349
  source 1..80: mol_type = other DNA
gtttgtccgtaagctcaaagatctcataggcagtgcatgggaatcatttgtgtcaggcattaggtgtgttggttacacta

SEQ ID NO: 19944 - DNA, 80 bp, synthetic construct
  misc_feature 1..80: note = Synthetic: >MG916901_10-cand-360-439
  source 1..80: mol_type = other DNA
tatacagcttgctacgtctttagctagtgcaactttacaagtttctagagatggcattactctcatggctactgtacctg

SEQ ID NO: 19945 - DNA, 80 bp, synthetic construct
  misc_feature 1..80: note = Synthetic: >MG916901_10-cand-450-529
  source 1..80: mol_type = other DNA
acgttgtttcgaagcatttagggacttcgtggtaggagtttttgaccttactgtgagtactatcaagattgctggttgta

SEQ ID NO: 19946 - DNA, 80 bp, synthetic construct
  misc_feature 1..80: note = Synthetic: >MG916901_10-cand-500-579
  source 1..80: mol_type = other DNA
ctgtgagtactatcaagattgctggttgtaactttaagtgcgttggttcctacgtgttgttggacaatgcacttgtgaag

SEQ ID NO: 19947 - DNA, 80 bp, synthetic construct
  misc_feature 1..80: note = Synthetic: >MG916901_11-cand-90-169
  source 1..80: mol_type = other DNA
tttgctctactttcagtgctattttgatgctgctgtagttcttcttacgctcttgtctcgcttagcataccttgcttatt

SEQ ID NO: 19948 - DNA, 80 bp, synthetic construct
  misc_feature 1..80: note = Synthetic: >MG916901_11-cand-290-369
  source 1..80: mol_type = other DNA
attatgtgcgacttgggaaccaaatggtaccttttgtcgttgctaaagacttgtatgttgcactacgtggccgtaaagat

SEQ ID NO: 19949 - DNA, 80 bp, synthetic construct
  misc_feature 1..80: note = Synthetic: >MG916901_11-cand-390-469
  source 1..80: mol_type = other DNA
gcgtgttgagcttaacaatggtgctttcatctacatatttgcacaagaaccggtggttggtgttgtaaatatgtgtttca

SEQ ID NO: 19950 - DNA, 80 bp, synthetic construct
  misc_feature 1..80: note = Synthetic: >MG916901_12-cand-0-79
  source 1..80: mol_type = other DNA
catagtaataatggtggacagttttacttacgtatatgtaagtggttgaatggcggaaacttggattgggcaacggagag

SEQ ID NO: 19951 - DNA, 80 bp, synthetic construct
  misc_feature 1..80: note = Synthetic: >MG916901_12-cand-200-279
  source 1..80: mol_type = other DNA
tcgttattacttgactaataactggaacagagtagatgttaagtgtgtaaattatcccacatgtattatcaaccctgttc

SEQ ID NO: 19952 - DNA, 80 bp, synthetic construct
  misc_feature 1..80: note = Synthetic: >MG916901_12-cand-290-369
  source 1..80: mol_type = other DNA
tacttttaatgtaacaacgaatgcccaaggtttatttcaatcgtatacggtgtgtgatgactgtaatggcttcccacaac

SEQ ID NO: 19953 - DNA, 80 bp, synthetic construct
  misc_feature 1..80: note = Synthetic: >MG916901_12-cand-380-459
  source 1..80: mol_type = other DNA
tgtcttagacggtggttacatacctagtgagtttggtttggacaactggtatgttctttctaatacgtctacagtgctgg

SEQ ID NO: 19954 - DNA, 80 bp, synthetic construct
  misc_feature 1..80: note = Synthetic: >MG916901_12-cand-470-549
  source 1..80: mol_type = other DNA
gttgactaatcagcctctattagtggcatgcctgtggccagtgccatcgctgctttcaaatgataaccctatccatttta

SEQ ID NO: 19955 - DNA, 80 bp, synthetic construct
  misc_feature 1..80: note = Synthetic: >MG916901_12-cand-550-629
  source 1..80: mol_type = other DNA
atatgtcacttaatacaggtgttaattgcaatggttatagtgaggtgcgtgaggtgtcacacttacgctttgccctcaac

SEQ ID NO: 19956 - DNA, 80 bp, synthetic construct
  misc_feature 1..80: note = Synthetic: >MG916901_12-cand-630-709
  source 1..80: mol_type = other DNA
tttaccaaccaacaagtgcttaatggtgtccataacatagatctgttaggggacacatttaacttcaccttcacatgtac

SEQ ID NO: 19957 - DNA, 80 bp, synthetic construct
  misc_feature 1..80: note = Synthetic: >MG916901_12-cand-710-789
  source 1..80: mol_type = other DNA
taataacagtgacatcactaagggcgagcgttttgtgccatttggtttcttagacaatgtctatcgttgcttcgtttatt

SEQ ID NO: 19958 - DNA, 80 bp, synthetic construct
  misc_feature 1..80: note = Synthetic: >MG916901_12-cand-800-879
  source 1..80: mol_type = other DNA
caacggtactgtgaacaagtttgttggcatcttaccacccgttgtgaaggagattgtcatttctaagtttggcactgttt

SEQ ID NO: 19959 - DNA, 80 bp, synthetic construct
  misc_feature 1..80: note = Synthetic: >MG916901_12-cand-890-969
  source 1..80: mol_type = other DNA
agtcaatatggccacattaccacctgttaacagtgtaatttttaatgttactagcacagtgggttcagatttttggactg

SEQ ID NO: 19960 - DNA, 80 bp, synthetic construct
  misc_feature 1..80: note = Synthetic: >MG916901_12-cand-970-1049
  source 1..80: mol_type = other DNA
taggtttcacggacctggctgatgtcatgatagatattaatgcaactagaattgttgacttactctactgtgacacacct

SEQ ID NO: 19961 - DNA, 80 bp, synthetic construct
  misc_feature 1..80: note = Synthetic: >MG916901_12-cand-1060-1139
  source 1..80: mol_type = other DNA
ttaagtgccagcagttatcattctcgttggatgatggcttttataccaccactaatgtatacaagcaagcggtcccacgc

SEQ ID NO: 19962 - DNA, 80 bp, synthetic construct
  misc_feature 1..80: note = Synthetic: >MG916901_12-cand-1150-1229
  source 1..80: mol_type = other DNA
cattaccatatcatgcaactcacagtgctattaatattactgcagaagtaagtgttaatagcaatgatgaccggtttttg

SEQ ID NO: 19963 - DNA, 80 bp, synthetic construct
  misc_feature 1..80: note = Synthetic: >MG916901_12-cand-1240-1319
  source 1..80: mol_type = other DNA
ttaatggtactttctgtgttaatactacacagtttactgttattacccattttacgcaatatactggtatgcgtgttgct

SEQ ID NO: 19964 - DNA, 80 bp, synthetic construct
  misc_feature 1..80: note = Synthetic: >MG916901_12-cand-1320-1399
  source 1..80: mol_type = other DNA
attgaaaacttagactgcccttttacgcttgattctctgaataacttcctgtcctttggctctatctgcttctctactta

SEQ ID NO: 19965 - DNA, 80 bp, synthetic construct
  misc_feature 1..80: note = Synthetic: >MG916901_2-cand-30-109
  source 1..80: mol_type = other DNA
agttttaaggcaagcagcaaataattgctgggccactgctgcactcgttcaattacaattgttggattgctatgagagtg

SEQ ID NO: 19966 - DNA, 80 bp, synthetic construct
  misc_feature 1..80: note = Synthetic: >MG916901_3-cand-30-109
  source 1..80: mol_type = other DNA
gcttatggtagtattgctgtaccatgtaatgtggtctttcagatgcgcatttcttgtccacttggtaattatacttatca

SEQ ID NO: 19967 - DNA, 80 bp, synthetic construct
  misc_feature 1..80: note = Synthetic: >MG916901_4-cand-0-79
  source 1..80: mol_type = other DNA
ccacactgttcttcagtgacaagtactatgtaaccccgcgcgatatgtttgagccgcgcacacctgttcaagctgatttt

SEQ ID NO: 19968 - DNA, 80 bp, synthetic construct
  misc_feature 1..80: note = Synthetic: >MG916901_7-cand-270-349
  source 1..80: mol_type = other DNA
atggaggtttaacggcgtgtgttgaagcatacaaggcagaaaataagactgtaccagccggtaatatcattacatttaag

SEQ ID NO: 19969 - DNA, 80 bp, synthetic construct
  misc_feature 1..80: note = Synthetic: >MG916901_8-cand-0-79
  source 1..80: mol_type = other DNA
aagtgtgataacctctcattggagtttgacacactttatgtcagtatacctagtatcactattgagtgtaaaaccaacaa

SEQ ID NO: 19970 - DNA, 80 bp, synthetic construct
  misc_feature 1..80: note = Synthetic: >MG916901_8-cand-120-199
  source 1..80: mol_type = other DNA
gttaagtatttaagcacaccacttcaattccctgaatatagtctcatcccctcaactaaacgactttattactacctgcc

SEQ ID NO: 19971 - DNA, 80 bp, synthetic construct
  misc_feature 1..80: note = Synthetic: >MG916901_8-cand-240-319
  source 1..80: mol_type = other DNA
atacactatgttgacactagttgatgatcatggtatggtacttagtgcacttttgtggctactggttttgttgtttgtgt

SEQ ID NO: 19972 - DNA, 80 bp, synthetic construct
  misc_feature 1..80: note = Synthetic: >MG916901_8-cand-290-369
  source 1..80: mol_type = other DNA
ttttgtggctactggttttgttgtttgtgttgcttatatctatcacgttaataaagcttgtacagctttgttttacgtgt

SEQ ID NO: 19973 - DNA, 80 bp, synthetic construct
  misc_feature 1..80: note = Synthetic: >MG916901_9-cand-150-229
  source 1..80: mol_type = other DNA
cctacatagtgtcaggcgtgttaaggccactgacctgtccatgtccgtagaggatgtgatagcagaatttagtgtctttg

SEQ ID NO: 19974 - DNA, 80 bp, synthetic construct
  misc_feature 1..80: note = Synthetic: >MG916901_9-cand-270-349
  source 1..80: mol_type = other DNA
tgccactgttcagtttgaggaggtagattttgtccagcctgctagtggtggtattcttgctattgtggatgatttctcct

SEQ ID NO: 19975 - DNA, 80 bp, synthetic construct
  misc_feature 1..80: note = Synthetic: >MG916901_9-cand-390-469
  source 1..80: mol_type = other DNA
tgcagttgtacctgtctgctacaagcgttgtggtggcggtgtcattcagttttctgacactgtggatgttaaggaaatag

SEQ ID NO: 19976 - DNA, 80 bp, synthetic construct
  misc_feature 1..80: note = Synthetic: >MG916902_1-cand-40-119
  source 1..80: mol_type = other DNA
taaggcctggaatgttgatcgtaccgatggcccgtttgcaagtcaaaccttgctgtctattaatgctatcacttggtgtg

SEQ ID NO: 19977 - DNA, 80 bp, synthetic construct
  misc_feature 1..80: note = Synthetic: >MG916902_10-cand-0-79
  source 1..80: mol_type = other DNA
caagggcagctcgaagaaactcaattattgtatgctctttgctagagcacttacactaattgtttatgtgcctttgttat

SEQ ID NO: 19978 - DNA, 80 bp, synthetic construct
  misc_feature 1..80: note = Synthetic: >MG916902_10-cand-90-169
  source 1..80: mol_type = other DNA
ggcttatgttgacgctgctgtcgtctttctcacaataactgctagatttctttacacaggctattggtcattccgttaca

SEQ ID NO: 19979 - DNA, 80 bp, synthetic construct
  misc_feature 1..80: note = Synthetic: >MG916902_10-cand-180-259
  source 1..80: mol_type = other DNA
ttttattgtgctaaacactgacaaattagcttttgtgtgtggcaaatattggtactatgaagaccaaccatacatcgtaa

SEQ ID NO: 19980 - DNA, 80 bp, synthetic construct
  misc_feature 1..80: note = Synthetic: >MG916902_10-cand-270-349
  source 1..80: mol_type = other DNA
agaacaacatgttcaatttggttatcacatggttccgtttgttgttgctaacgacttgtatgttgcacttagaggcataa

SEQ ID NO: 19981 - DNA, 80 bp, synthetic construct
  misc_feature 1..80: note = Synthetic: >MG916902_10-cand-360-439
  source 1..80: mol_type = other DNA
tgtaccacttgttagacgagttgaactaatcaatggtacattcatttacatctttgctcaagagcctgctgtaggtgttg

SEQ ID NO: 19982 - DNA, 80 bp, synthetic construct
  misc_feature 1..80: note = Synthetic: >MG916902_10-cand-450-529
  source 1..80: mol_type = other DNA
cttttctgagattcaacttcacgaagactcagtgtgacgtgttagcatgctactactgaatgtaactacaattataggtt

SEQ ID NO: 19983 - DNA, 80 bp, synthetic construct
  misc_feature 1..80: note = Synthetic: >MG916902_11-cand-0-79
  source 1..80: mol_type = other DNA
ggttacctaccccgtaaaaatgggtgggagtgcccaaccattaacaaccaatatggtggttcaaccaactatgagaatgt

SEQ ID NO: 19984 - DNA, 80 bp, synthetic construct
  misc_feature 1..80: note = Synthetic: >MG916902_11-cand-80-159
  source 1..80: mol_type = other DNA
ccatggtattttctggtcttatcattctacagctcaaagatttgagttaggtgtgtccaacaaggaccagttggtgaata

SEQ ID NO: 19985 - DNA, 80 bp, synthetic construct
  misc_feature 1..80: note = Synthetic: >MG916902_11-cand-160-239
  source 1..80: mol_type = other DNA
caaacagatgggcactctacgtttaccaaaacaacaatgaaggtgtgctaaaattacgcatctgtaagtggttgcgtggt

SEQ ID NO: 19986 - DNA, 80 bp, synthetic construct
  misc_feature 1..80: note = Synthetic: >MG916902_11-cand-240-319
  source 1..80: mol_type = other DNA
cagtacagcttacagtggttacatggtgctagacatgggcagtgtgcagtagatagagcgtttaattttaggtttgtaca

SEQ ID NO: 19987 - DNA, 80 bp, synthetic construct
  misc_feature 1..80: note = Synthetic: >MG916902_11-cand-320-399
  source 1..80: mol_type = other DNA
cgctgaaaatcaggtactaggtgtcacttggtcctctaattatgtcactttttatggtattaatggtagttaccgttatt

SEQ ID NO: 19988 - DNA, 80 bp, synthetic construct
  misc_feature 1..80: note = Synthetic: >MG916902_11-cand-410-489
  source 1..80: mol_type = other DNA
tgactggtttagggtgtccgttaaatgtgaaaataagtatgtctgtgctatataccctgtgtataaccagactaccctca

SEQ ID NO: 19989 - DNA, 80 bp, synthetic construct
  misc_feature 1..80: note = Synthetic: >MG916902_11-cand-490-569
  source 1..80: mol_type = other DNA
atatcacaacaaatgctaagggcttgattaaggaatatagcgtgtgcgagtcttgcaatggtttccctgctcatgtcttc

SEQ ID NO: 19990 - DNA, 80 bp, synthetic construct
  misc_feature 1..80: note = Synthetic: >MG916902_11-cand-580-659
  source 1..80: mol_type = other DNA
aaggtggtaaaataccagctgactttgattttactaactggttttacttgtcaaacacctcaacacttgttgctggtcgt

SEQ ID NO: 19991 - DNA, 80 bp, synthetic construct
  misc_feature 1..80: note = Synthetic: >MG916902_11-cand-660-739
  source 1..80: mol_type = other DNA
gttgtcggcattcaaccacttagactactctgtttatggccagtaccatctactacggctaatgatgacaagatttactt

SEQ ID NO: 19992 - DNA, 80 bp, synthetic construct
  misc_feature 1..80: note = Synthetic: >MG916902_11-cand-740-819
  source 1..80: mol_type = other DNA
taatacaacaggtgctaattgtaatggatttgttggtgaaggcgttgcagatgcattgcgtttttctctgaacttcacat

SEQ ID NO: 19993 - DNA, 80 bp, synthetic construct
  misc_feature 1..80: note = Synthetic: >MG916902_11-cand-820-899
  source 1..80: mol_type = other DNA
caaaccaggtccttaatggtgtccataacatcattttggaaagcacctcttcaaagtttactttcacgtgccgtaatgat

SEQ ID NO: 19994 - DNA, 80 bp, synthetic construct
  misc_feature 1..80: note = Synthetic: >MG916902_11-cand-880-959
  source 1..80: mol_type = other DNA
ctttcacgtgccgtaatgattctgaatccaccttttacagagttccttttggtgaaacgggacaagtctattattgtttc

SEQ ID NO: 19995 - DNA, 80 bp, synthetic construct
  misc_feature 1..80: note = Synthetic: >MG916902_11-cand-960-1039
  source 1..80: mol_type = other DNA
attttcacagaggcaggcaatcagagctataacacatttgtaggtattttaccacctgtgctaaaagaaatcgttatttc

SEQ ID NO: 19996 - DNA, 80 bp, synthetic construct
  misc_feature 1..80: note = Synthetic: >MG916902_12-cand-0-79
  source 1..80: mol_type = other DNA
cacgctggatggtttacatctgtggcgtgttgtcaaattgcagagtgtcgaaggtttcgtggcttcggctaacttcgaca

SEQ ID NO: 19997 - DNA, 80 bp, synthetic construct
  misc_feature 1..80: note = Synthetic: >MG916902_12-cand-80-159
  source 1..80: mol_type = other DNA
aaaatgagtacacctacctgtcagaacacatttgcagccctacaaacatggaggaagtctctttcagtttcaagtttggg

SEQ ID NO: 19998 - DNA, 80 bp, synthetic construct
  misc_feature 1..80: note = Synthetic: >MG916902_12-cand-170-249
  source 1..80: mol_type = other DNA
gtgtgtatgcagatgatgttaaagcagctattgctgaaggtaaaatcacagttgggaactgtattcttgatgtgcttgac

SEQ ID NO: 19999 - DNA, 80 bp, synthetic construct
  misc_feature 1..80: note = Synthetic: >MG916902_12-cand-260-339
  source 1..80: mol_type = other DNA
tagaaccttggtttgtacgcaagctaaaggatttaatcggagctgcctgggaagcttttgttaagggcattaagtgtttg

SEQ ID NO: 20000 - DNA, 80 bp, synthetic construct
  misc_feature 1..80: note = Synthetic: >MG916902_12-cand-340-419
  source 1..80: mol_type = other DNA
agctacactagcgctcatgttattgagctaaccaaggcattgtctaaagctgtcttgactgtgactagagaaggtcttaa

SEQ ID NO: 20001 - DNA, 80 bp, synthetic construct
  misc_feature 1..80: note = Synthetic: >MG916902_12-cand-790-869
  source 1..80: mol_type = other DNA
tactatagattgatgagtgattccgagtttgtcctggacacacctgtgttcaaggctgtggagtcatacagtcctatttt

SEQ ID NO: 20002 - DNA, 80 bp, synthetic construct
  misc_feature 1..80: note = Synthetic: >MG916902_12-cand-880-959
  source 1..80: mol_type = other DNA
gtacccacgggttttgcgccaccctcatgtgactctttgccagctctggtaactgccactgttagccaattagctgcatt

SEQ ID NO: 20003 - DNA, 80 bp, synthetic construct
  misc_feature 1..80: note = Synthetic: >MG916902_2-cand-30-109
  source 1..80: mol_type = other DNA
gtccttaaatctaagataaaatgggtaaaactatttggcaagctgttgttgacgttgttcgcactgtattcaacttggtt

SEQ ID NO: 20004 - DNA, 80 bp, synthetic construct
  misc_feature 1..80: note = Synthetic: >MG916902_3-cand-0-79
  source 1..80: mol_type = other DNA
ttagtagcccttttgcctttgaattttacgaccttaatggcgtaaaggttttaagacaagcagcaaataactgttgggca

SEQ ID NO: 20005 - DNA, 80 bp, synthetic construct
  misc_feature 1..80: note = Synthetic: >MG916902_4-cand-0-79
  source 1..80: mol_type = other DNA
catgtttgaaccacgaacacctgttgctgctgactttgtccgtattgctaattgtagtgtgacatacgtcaatattactg

SEQ ID NO: 20006 - DNA, 80 bp, synthetic construct
  misc_feature 1..80: note = Synthetic: >MG916902_4-cand-150-229
  source 1..80: mol_type = other DNA
taacttcacactgccagatttcaacttggatcagttcaataacacatatctcaaccttagtgctgagatagctctgttga

SEQ ID NO: 20007 - DNA, 80 bp, synthetic construct
  misc_feature 1..80: note = Synthetic: >MG916902_5-cand-50-129
  source 1..80: mol_type = other DNA
gcaagcgtgttgttacaacacccgtatataatgctagtgttttgcgatcaggttatgaagatggtgtttgtacacatggt

SEQ ID NO: 20008 - DNA, 80 bp, synthetic construct
  misc_feature 1..80: note = Synthetic: >MG916902_8-cand-0-79
  source 1..80: mol_type = other DNA
cttgttttatgcactttgttggcttttcttaggatggcctgatgaagtagtttttaaggtgcttgatgttaattttgcct

SEQ ID NO: 20009 - DNA, 80 bp, synthetic construct
  misc_feature 1..80: note = Synthetic: >MG916902_8-cand-250-329
  source 1..80: mol_type = other DNA
gaaatgcgtgtgctaattctactttcactgttgtcagtggcgcttacagctgcgccagagatacatcattatattgattg

SEQ ID NO: 20010 - DNA, 80 bp, synthetic construct
  misc_feature 1..80: note = Synthetic: >MG916902_8-cand-350-429
  source 1..80: mol_type = other DNA
ccatcttacaaccatgtgatggtgttatagaaagtacaagcccagtgcagttcacacctaatacccagtatggtagtttg

SEQ ID NO: 20011 - DNA, 80 bp, synthetic construct
  misc_feature 1..80: note = Synthetic: >MG916902_8-cand-450-529
  source 1..80: mol_type = other DNA
gacacaaattcgcatttcttgtcctcatggtaatcacacatttcatgttagacctgttagtttcagaacacatacacgct

SEQ ID NO: 20012 - DNA, 80 bp, synthetic construct; identical to SEQ ID NO: 19976
  misc_feature 1..80: note = Synthetic: >MG916903_1-cand-40-119
  source 1..80: mol_type = other DNA

SEQ ID NO: 20013 - DNA, 80 bp, synthetic construct; identical to SEQ ID NO: 19977
  misc_feature 1..80: note = Synthetic: >MG916903_11-cand-0-79
  source 1..80: mol_type = other DNA

SEQ ID NO: 20014 - DNA, 80 bp, synthetic construct; identical to SEQ ID NO: 19978
  misc_feature 1..80: note = Synthetic: >MG916903_11-cand-90-169
  source 1..80: mol_type = other DNA

SEQ ID NO: 20015 - DNA, 80 bp, synthetic construct; identical to SEQ ID NO: 19979
  misc_feature 1..80: note = Synthetic: >MG916903_11-cand-180-259
  source 1..80: mol_type = other DNA

SEQ ID NO: 20016 - DNA, 80 bp, synthetic construct; identical to SEQ ID NO: 19980
  misc_feature 1..80: note = Synthetic: >MG916903_11-cand-270-349
  source 1..80: mol_type = other DNA

SEQ ID NO: 20017 - DNA, 80 bp, synthetic construct; identical to SEQ ID NO: 19981
  misc_feature 1..80: note = Synthetic: >MG916903_11-cand-360-439
  source 1..80: mol_type = other DNA

SEQ ID NO: 20018 - DNA, 80 bp, synthetic construct; identical to SEQ ID NO: 19982
  misc_feature 1..80: note = Synthetic: >MG916903_11-cand-450-529
  source 1..80: mol_type = other DNA

SEQ ID NO: 20019 - DNA, 80 bp, synthetic construct; identical to SEQ ID NO: 19996
  misc_feature 1..80: note = Synthetic: >MG916903_12-cand-0-79
  source 1..80: mol_type = other DNA

SEQ ID NO: 20020 - DNA, 80 bp, synthetic construct; identical to SEQ ID NO: 19997
  misc_feature 1..80: note = Synthetic: >MG916903_12-cand-80-159
  source 1..80: mol_type = other DNA

SEQ ID NO: 20021 - DNA, 80 bp, synthetic construct; identical to SEQ ID NO: 19998
  misc_feature 1..80: note = Synthetic: >MG916903_12-cand-170-249
  source 1..80: mol_type = other DNA

SEQ ID NO: 20022 - DNA, 80 bp, synthetic construct; identical to SEQ ID NO: 19999
  misc_feature 1..80: note = Synthetic: >MG916903_12-cand-260-339
  source 1..80: mol_type = other DNA

SEQ ID NO: 20023 - DNA, 80 bp, synthetic construct; identical to SEQ ID NO: 20000
  misc_feature 1..80: note = Synthetic: >MG916903_12-cand-340-419
  source 1..80: mol_type = other DNA

SEQ ID NO: 20024 - DNA, 80 bp, synthetic construct
  misc_feature 1..80: note = Synthetic: >MG916903_12-cand-770-849
  source 1..80: mol_type = other DNA
ctttcttttgtagtggcggttactatagactgatgagtgactccgatgttgtcctggacatacctgtgtttaaggctgtg

SEQ ID NO: 20025 - DNA, 80 bp, synthetic construct
  misc_feature 1..80: note = Synthetic: >MG916903_12-cand-850-929
  source 1..80: mol_type = other DNA
gagtcatacagtcctgtctttgagtgtgctgtacccacgggttttgtgccacctacatgtgattctttgccagctttggt

SEQ ID NO: 20026 - DNA, 80 bp, synthetic construct
  misc_feature 1..80: note = Synthetic: >MG916903_12-cand-930-1009
  source 1..80: mol_type = other DNA
aactgccactgttagccaattagctgcatttaatacaccatatcgtgtgtataatgtcagcgtggttaaacaacagtgtg

SEQ ID NO: 20027 - DNA, 80 bp, synthetic construct
  misc_feature 1..80: note = Synthetic: >MG916903_12-cand-1010-1089
  source 1..80: mol_type = other DNA
ttgttaccgttagctataccttcagagcaccaagttatctaggtgattcacaggaatttcgcgacgcgtgtcttgcttgc

SEQ ID NO: 20028 - DNA, 80 bp, synthetic construct
  misc_feature 1..80: note = Synthetic: >MG916903_12-cand-1100-1179
  source 1..80: mol_type = other DNA
aaggttttgatgccttttatgtgaatgcacatgcggcagagtcgttagtgtcatttgagcctgttttcccagagtttttc

SEQ ID NO: 20029 - DNA, 80 bp, synthetic construct
  misc_feature 1..80: note = Synthetic: >MG916903_12-cand-1180-1259
  source 1..80: mol_type = other DNA
caatttgctacaagcgtgtcgtgtcccgacttattgttggagatagacggcggtggtatttggaaaacttttattcgaac

SEQ ID NO: 20030 - DNA, 80 bp, synthetic construct
  misc_feature 1..80: note = Synthetic: >MG916903_12-cand-1260-1339
  source 1..80: mol_type = other DNA
tgttggcaatgcgagtgattttgttagatcactgtctcttagttttgatcttaatggacttgttattaagacaactaaga

SEQ ID NO: 20031 - DNA, 80 bp, synthetic construct
  misc_feature 1..80: note = Synthetic: >MG916903_12-cand-1350-1429
  source 1..80: mol_type = other DNA
ctttgctgctgcattaacaaatctttacagggagtttgttgctacagtaactgaggttattagaattggtagtgttgcat

SEQ ID NO: 20032 - DNA, 80 bp, synthetic construct
  misc_feature 1..80: note = Synthetic: >MG916903_12-cand-1430-1509
  source 1..80: mol_type = other DNA
tcacctactatgcatttaatgtgcctaaagttcttgtttcaggtgtcttacacagtgtcagacgtgtgaaagctgatgaa

SEQ ID NO: 20033 - DNA, 80 bp, synthetic construct
  misc_feature 1..80: note = Synthetic: >MG916903_12-cand-1480-1559
  source 1..80: mol_type = other DNA
cacagtgtcagacgtgtgaaagctgatgaactgtctatgtctgttgaagacgttatagctgagttcacagtttttgacgg

SEQ ID NO: 20034 - DNA, 80 bp, synthetic construct; identical to SEQ ID NO: 20003
  misc_feature 1..80: note = Synthetic: >MG916903_2-cand-30-109
  source 1..80: mol_type = other DNA

SEQ ID NO: 20035 - DNA, 80 bp, synthetic construct
  misc_feature 1..80: note = Synthetic: >MG916903_3-cand-0-79
  source 1..80: mol_type = other DNA
ttagtagcccctttgcctttgaattctacgaccttaatggcgtaaaggttttaagacaagcagcaaacaactgttgggca

SEQ ID NO: 20036 - DNA, 80 bp, synthetic construct
  misc_feature 1..80: note = Synthetic: >MG916903_4-cand-0-79
  source 1..80: mol_type = other DNA
ttgctgatgctttacgcttttccctcaacttcactgcaaaccaaatccttaatggtgtccataacatcattttggaaggt

SEQ ID NO: 20037 - DNA, 80 bp, synthetic construct
  misc_feature 1..80: note = Synthetic: >MG916903_4-cand-90-169
  source 1..80: mol_type = other DNA
agttcacttttacatgccgtaatgattctgagtccacgctctttagagtcccttttggtgttactggacaggtgtattac

SEQ ID NO: 20038 - DNA, 80 bp, synthetic construct; identical to SEQ ID NO: 20005
  misc_feature 1..80: note = Synthetic: >MG916903_5-cand-0-79
  source 1..80: mol_type = other DNA

SEQ ID NO: 20039 - DNA, 80 bp, synthetic construct; identical to SEQ ID NO: 20006
  misc_feature 1..80: note = Synthetic: >MG916903_5-cand-150-229
  source 1..80: mol_type = other DNA

SEQ ID NO: 20040 - DNA, 80 bp, synthetic construct
  misc_feature 1..80: note = Synthetic: >MG916903_6-cand-0-79
  source 1..80: mol_type = other DNA
ttgctcaactcgtagaggctcccacaattttgcctaagccatatcgtagcgagggacgttttgacttttacgatgtgaag

SEQ ID NO: 20041 - DNA, 80 bp, synthetic construct; identical to SEQ ID NO: 20007
  misc_feature 1..80: note = Synthetic: >MG916903_7-cand-50-129
  source 1..80: mol_type = other DNA

SEQ ID NO: 20042 - DNA, 80 bp, synthetic construct
  misc_feature 1..80: note = Synthetic: >MG916903_8-cand-0-79
  source 1..80: mol_type = other DNA
tggctatttacctcagaaaacaggctgggtttgtccagaaaacaaagaagctggtgctacctcttacgaaggcgtgcatg

SEQ ID NO: 20043 - DNA, 80 bp, synthetic construct
  misc_feature 1..80: note = Synthetic: >MG916903_8-cand-100-179
  source 1..80: mol_type = other DNA
gcaactggtcaggatgttgaaataggtgtgtctaattttagacagcttaacaacaccaacagatgggctttgtatgtgca

SEQ ID NO: 20044 - DNA, 80 bp, synthetic construct
  misc_feature 1..80: note = Synthetic: >MG916903_8-cand-200-279
  source 1..80: mol_type = other DNA
ttttacactttcgtatttgtaagtggctagctggtacttatacccctcagagtaggccatggtcacgctatggccaatgt

SEQ ID NO: 20045 - DNA, 80 bp, synthetic construct
  misc_feature 1..80: note = Synthetic: >MG916903_9-cand-0-79
  source 1..80: mol_type = other DNA
tgcttagatctgtgtaaatatctgttctatgcattgtgctggcttttacttggctggcctgatgaactagtttttaaggt

SEQ ID NO: 20046 - DNA, 80 bp, synthetic construct
  misc_feature 1..80: note = Synthetic: >MG916903_9-cand-110-189
  source 1..80: mol_type = other DNA
ttgcctggtgttgttctctgctaccccagtgttcctaccagttttagatgagattcttttagatgtgctggatttaatta

SEQ ID NO: 20047 - DNA, 80 bp, synthetic construct
  misc_feature 1..80: note = Synthetic: >MG916903_9-cand-220-299
  source 1..80: mol_type = other DNA
ggcaatttatgtaattataccaactttggtattttctagctaataatttcaatttcacgaaatgcgtgtgttgcttctgc

SEQ ID NO: 20048 - DNA, 80 bp, synthetic construct
  misc_feature 1..80: note = Synthetic: >MG916903_9-cand-470-549
  source 1..80: mol_type = other DNA
gttgtacaaattcgcattctgtgtccccgtggtaattacacttttcacattagacctgtaagctttaggacgcacactcg

SEQ ID NO: 20049 - DNA, 80 bp, synthetic construct
  misc_feature 1..80: note = Synthetic: >MG916904_1-cand-30-109
  source 1..80: mol_type = other DNA
tactgtgatagtgttacttgtcgtacttgtctctatgggtatcaacaactctctgatttccctcatacatcaattgtttg

SEQ ID NO: 20050 - DNA, 80 bp, synthetic construct
  misc_feature 1..80: note = Synthetic: >MG916904_10-cand-0-79
  source 1..80: mol_type = other DNA
aagtttggaatgcttagtggtgtgttcgatgatgatgtgagaaatgctgtggttaatggtactattgtagtcagcaatgt

SEQ ID NO: 20051 - DNA, 80 bp, synthetic construct
  misc_feature 1..80: note = Synthetic: >MG916904_10-cand-100-179
  source 1..80: mol_type = other DNA
ctgtacttgtcaaaccttggtttgttcgtaacttgtctgagttgattggcagtgcttggaacacttttgtgactggtgta

SEQ ID NO: 20052 - DNA, 80 bp, synthetic construct
  misc_feature 1..80: note = Synthetic: >MG916904_10-cand-200-279
  source 1..80: mol_type = other DNA
tgcacaattgatagaacttgttaaggcttttgctaaggcaactttagttgcaactagtgaaggcttaaaattcacagctg

SEQ ID NO: 20053 - DNA, 80 bp, synthetic construct
  misc_feature 1..80: note = Synthetic: >MG916904_10-cand-300-379
  source 1..80: mol_type = other DNA
acctgctttgaaattttcaaagaatttgttaatggtgtgtttgatctcactgttaaaacttttaaagttgctggtgtctc

SEQ ID NO: 20054 - DNA, 80 bp, synthetic construct
  misc_feature 1..80: note = Synthetic: >MG916904_10-cand-400-479
  source 1..80: mol_type = other DNA
atattttgttgaacaatgctttggtgaagcttgtttcagttaaagttaaaggtctacgtgaagctggtttgactagtgcc

SEQ ID NO: 20055 - DNA, 80 bp, synthetic construct
  misc_feature 1..80: note = Synthetic: >MG916904_10-cand-500-579
  source 1..80: mol_type = other DNA
gggtaagactactaaggtgagagcaaagagactagaagcatctaatgttaaccttaaacttgttgagaatcagccagttg

SEQ ID NO: 20056 - DNA, 80 bp, synthetic construct
  misc_feature 1..80: note = Synthetic: >MG916904_10-cand-550-629
  source 1..80: mol_type = other DNA
accttaaacttgttgagaatcagccagttgtaaaagagggcattgctaagatcattggtggtattaccttctttgaaagt

SEQ ID NO: 20057 - DNA, 80 bp, synthetic construct
  misc_feature 1..80: note = Synthetic: >MG916904_11-cand-120-199
  source 1..80: mol_type = other DNA
ctggagttcgttcattaagactgttgctaatgctgttgattttgctaaaaacttaactgttagttttgatctgagtggta

SEQ ID NO: 20058 - DNA, 80 bp, synthetic construct
  misc_feature 1..80: note = Synthetic: >MG916904_11-cand-220-299
  source 1..80: mol_type = other DNA
cgctttaagcgatttgcatctgttttgactaacctctacagagagttcattgctacagttacacaggcgattagtattgg

SEQ ID NO: 20059 - DNA, 80 bp, synthetic construct
  misc_feature 1..80: note = Synthetic: >MG916904_11-cand-320-399
  source 1..80: mol_type = other DNA
atgccttcaatgttcccaaagtcttcatttcaggagttttacacactgttagacgtgtttcattaagttccttcaacata

SEQ ID NO: 20060 - DNA, 80 bp, synthetic construct
  misc_feature 1..80: note = Synthetic: >MG916904_11-cand-420-499
  source 1..80: mol_type = other DNA
tgatgtgcatgtctttgatggtacctctataccaataacagcggttagagttgagcaagttgttgttaaatttgaggaat

SEQ ID NO: 20061 - DNA, 80 bp, synthetic construct
  misc_feature 1..80: note = Synthetic: >MG916904_11-cand-520-599
  source 1..80: mol_type = other DNA
tctaatggtgtgttggcagtcattgataatcatacattttataacactggcaattattactaccctgctaatgaaactgc

SEQ ID NO: 20062 - DNA, 80 bp, synthetic construct
  misc_feature 1..80: note = Synthetic: >MG916904_11-cand-620-699
  source 1..80: mol_type = other DNA
aacgtagtggtggtggtgttgtccagtttgctgagacagtggctgttaaagaaattgaacctgtttataaagttaagctt

SEQ ID NO: 20063 - DNA, 80 bp, synthetic construct
  misc_feature 1..80: note = Synthetic: >MG916904_12-cand-0-79
  source 1..80: mol_type = other DNA
atacaccaagatcatatgtcgctctaccgtatcatgccacccacactgaagtagttcttggtgtacacctctcattgtac

SEQ ID NO: 20064 - DNA, 80 bp, synthetic construct
  misc_feature 1..80: note = Synthetic: >MG916904_12-cand-90-169
  source 1..80: mol_type = other DNA
gtgctacccttaatggtggtaatgacacaatttgtgtgaacacaacccagttcaccacagtacttaatgcttcagtttat

SEQ ID NO: 20065 - DNA, 80 bp, synthetic construct
  misc_feature 1..80: note = Synthetic: >MG916904_12-cand-180-259
  source 1..80: mol_type = other DNA
gaggtgatgtcgttaatgtcaattgcccatttacgtgggcttcgctcaatgactatcttagctttggtaccatttgtttt

SEQ ID NO: 20066 - DNA, 80 bp, synthetic construct
  misc_feature 1..80: note = Synthetic: >MG916904_12-cand-270-349
  source 1..80: mol_type = other DNA
cactacctggtggttgtactatgagcattaatgtagtgaatcttggttattacacacctttcgccacattgtatgtgggc

SEQ ID NO: 20067 - DNA, 80 bp, synthetic construct
  misc_feature 1..80: note = Synthetic: >MG916904_12-cand-360-439
  source 1..80: mol_type = other DNA
gacatggtataacgggtgtgtcacagaaggttggtggtatttttgaccctagttttattacgttagacacttgtactgag

SEQ ID NO: 20068 - DNA, 80 bp, synthetic construct
  misc_feature 1..80: note = Synthetic: >MG916904_12-cand-450-529
  source 1..80: mol_type = other DNA
acggaataactggcaaaggtgttattactagcctcaacaagaccattgttgctggtttgtattatacatctacgtcaggt

SEQ ID NO: 20069 - DNA, 80 bp, synthetic construct
  misc_feature 1..80: note = Synthetic: >MG916904_12-cand-540-619
  source 1..80: mol_type = other DNA
ggttcaagaattccaccacaggtgaggtctttgctgtcagaccttgtgatttagccagtcaggttgccgtctaccagaat

SEQ ID NO: 20070 - DNA, 80 bp, synthetic construct
  misc_feature 1..80: note = Synthetic: >MG916904_12-cand-630-709
  source 1..80: mol_type = other DNA
gtgccatgacagctagtcgtaatagtagttttggctttgctaatgttagtgagctttctaacttctattaccactctaat

SEQ ID NO: 20071 - DNA, 80 bp, synthetic construct
  misc_feature 1..80: note = Synthetic: >MG916904_12-cand-720-799
  source 1..80: mol_type = other DNA
gttgtgaagaaccagtacttatttatggtaagatgggcatttgttctgatggctcactcactgaagtcaacaacaaagat

SEQ ID NO: 20072 - DNA, 80 bp, synthetic construct
  misc_feature 1..80: note = Synthetic: >MG916904_12-cand-810-889
  source 1..80: mol_type = other DNA
aacctgtgtcaccaattgctaccgctaatgtgactgtcccagtcaattttacagtctctgttcaggttgagtatttacag

SEQ ID NO: 20073 - DNA, 80 bp, synthetic construct
  misc_feature 1..80: note = Synthetic: >MG916904_12-cand-900-979
  source 1..80: mol_type = other DNA
aaccagtcagtgttgattgcaacacgtatgtctgcagtggtaatgtgcactgtttacgtttgctcacccagtatgcttcg

SEQ ID NO: 20074 - DNA, 80 bp, synthetic construct
  misc_feature 1..80: note = Synthetic: >MG916904_13-cand-0-79
  source 1..80: mol_type = other DNA
aagcagattctgttaagatcaattgccttatgttgatcttgagagtattaacacttttgtgttatgtacctcttctgctt

SEQ ID NO: 20075 - DNA, 80 bp, synthetic construct
  misc_feature 1..80: note = Synthetic: >MG916904_13-cand-90-169
  source 1..80: mol_type = other DNA
catatttagatgctattattatctggttagtgttggctggtagaattgcttatactagctattgggctgttaaatataaa

SEQ ID NO: 20076 - DNA, 80 bp, synthetic construct
  misc_feature 1..80: note = Synthetic: >MG916904_13-cand-300-379
  source 1..80: mol_type = other DNA
ttacttttgtggttgctgctgatgtttatgttgcattgcgtggtaaaattgaaatggatgtaccacttactagatgtgtt

SEQ ID NO: 20077 - DNA, 80 bp, synthetic construct
  misc_feature 1..80: note = Synthetic: >MG916904_13-cand-390-469
  source 1..80: mol_type = other DNA
atggtgcttttatttatgtttttaccaaggaggcttgtgttggtatttttaatatttgctcgagcgagtttcaactttgc

SEQ ID NO: 20078 - DNA, 80 bp, synthetic construct
  misc_feature 1..80: note = Synthetic: >MG916904_13-cand-480-559
  source 1..80: mol_type = other DNA
atttgacagacgacgacgtttgaaatgcttgtcaattgtgtttactcgcttattacagttgtcacattgaattgtacttg

SEQ ID NO: 20079 - DNA, 80 bp, synthetic construct
  misc_feature 1..80: note = Synthetic: >MG916904_13-cand-570-649
  source 1..80: mol_type = other DNA
gatgctaacactgtaacgatttctttaaatgtgtcaggtgctcaacgtgttgattggtttaaaaacatcactaaaaagct

SEQ ID NO: 20080 - DNA, 80 bp, synthetic construct
  misc_feature 1..80: note = Synthetic: >MG916904_13-cand-660-739
  source 1..80: mol_type = other DNA
ggacattcttttcaaggtgatgttttcatttgtaataaaactacgcttactactcaacttaaagtgggtagtaatgttag

SEQ ID NO: 20081 - DNA, 80 bp, synthetic construct
  misc_feature 1..80: note = Synthetic: >MG916904_13-cand-750-829
  source 1..80: mol_type = other DNA
catgcaacacatggtggcacagtacacaatggcgtttttaatgttagcgtttacgaatcaacagccattacacagccccc

SEQ ID NO: 20082 - DNA, 80 bp, synthetic construct
  misc_feature 1..80: note = Synthetic: >MG916904_13-cand-840-919
  source 1..80: mol_type = other DNA
tctttgttgtctcctttacatcaccaagctgttgaatacccctcaaccaaacgactatattacctgctaccgctagcttt

SEQ ID NO: 20083 - DNA, 80 bp, synthetic construct
  misc_feature 1..80: note = Synthetic: >MG916904_13-cand-930-1009
  source 1..80: mol_type = other DNA
gcttggttggttgtgttgtttattcactatgctgactttagtaaatgataatggcatgattgtcaatgccttattatggc

SEQ ID NO: 20084 - DNA, 80 bp, synthetic construct
  misc_feature 1..80: note = Synthetic: >MG916904_13-cand-1020-1099
  source 1..80: mol_type = other DNA
actttttgttctacttatagccattactgtaattaaacttattcaactttgtttcatttgccataagcttatgtccaaca

SEQ ID NO: 20085 - DNA, 80 bp, synthetic construct
  misc_feature 1..80: note = Synthetic: >MG916904_14-cand-0-79
  source 1..80: mol_type = other DNA
ctaaccacttggtttcaactaaacaaaaatgatactttctcttcttcttcttgttattgctgtgtgtgttaataataact

SEQ ID NO: 20086 - DNA, 80 bp, synthetic construct
  misc_feature 1..80: note = Synthetic: >MG916904_14-cand-50-129
  source 1..80: mol_type = other DNA
ttgttattgctgtgtgtgttaataataactatgcttggcttggtttgcagcgcaatgctattcctccttctaaccaggat

SEQ ID NO: 20087 - DNA, 80 bp, synthetic construct
  misc_feature 1..80: note = Synthetic: >MG916904_14-cand-140-219
  source 1..80: mol_type = other DNA
gtggtgatcctggtaagctgcctaatcttaatctaggtttgccaccaaataagacagtttttgttagtggttatttacca

SEQ ID NO: 20088 - DNA, 80 bp, synthetic construct
  misc_feature 1..80: note = Synthetic: >MG916904_14-cand-230-309
  source 1..80: mol_type = other DNA
gttgggtttgtcccacacatccacttggaggtggaggttatggtactacttttaatgacattcatgccatttattggtcc

SEQ ID NO: 20089 - DNA, 80 bp, synthetic construct
  misc_feature 1..80: note = Synthetic: >MG916904_14-cand-320-399
  source 1..80: mol_type = other DNA
ctgcaaatgctgttgaactagctgtttcgtctggtaatggttctgtgaccagagattggtcactttatgttcaccacagt

SEQ ID NO: 20090 - DNA, 80 bp, synthetic construct
  misc_feature 1..80: note = Synthetic: >MG916904_14-cand-410-489
  source 1..80: mol_type = other DNA
gttatatgtattttaagatctgtaggtggggtgccgtttacccattgaacttatcaccaaaccacaatagaggtgattgt

SEQ ID NO: 20091 - DNA, 80 bp, synthetic construct
  misc_feature 1..80: note = Synthetic: >MG916904_14-cand-500-579
  source 1..80: mol_type = other DNA
gaaagttcaactttaggttcttacatggcgctaatcaagtcttaggtgttacatggtcttctaactatgtaacgttgtat

SEQ ID NO: 20092 - DNA, 80 bp, synthetic construct
  misc_feature 1..80: note = Synthetic: >MG916904_14-cand-590-669
  source 1..80: mol_type = other DNA
atacttacaggttttacttacacaacaattgggaacgtgctactgtacgttgccatacaaaacagtcatgtgcatttttc

SEQ ID NO: 20093 - DNA, 80 bp, synthetic construct
  misc_feature 1..80: note = Synthetic: >MG916904_14-cand-680-759
  source 1..80: mol_type = other DNA
atgtgactactttaaacatcactactaatggtgaaggtttgatagagtcatatgatgtttgtgcagactgtggtggcttc

SEQ ID NO: 20094 - DNA, 80 bp, synthetic construct
  misc_feature 1..80: note = Synthetic: >MG916904_14-cand-770-849
  source 1..80: mol_type = other DNA
tctttccagttttagaacacggctatatccctaatgattttagtttctctaattggtttatgctgtctaatacttctacc

SEQ ID NO: 20095 - DNA, 80 bp, synthetic construct
  misc_feature 1..80: note = Synthetic: >MG916904_14-cand-860-939
  source 1..80: mol_type = other DNA
gtaaattagttagcacacaaccattgaagctaatgtgcttgtggcctgtgccatcgttgcttgctaacgatgaaaaaata

SEQ ID NO: 20096 - DNA, 80 bp, synthetic construct
  misc_feature 1..80: note = Synthetic: >MG916904_14-cand-950-1029
  source 1..80: mol_type = other DNA
catccggcgccacttgtaatggatatcagtttgatggtgtcgctgacgctattaggttttctttgaattttagtagtgac

SEQ ID NO: 20097 - DNA, 80 bp, synthetic construct
  misc_feature 1..80: note = Synthetic: >MG916904_2-cand-30-109
  source 1..80: mol_type = other DNA
ttccgcatgattttatagttaacgctgccaacgaaaaccttagccatggaggtggtgtagctgcagcaattgataatttg

SEQ ID NO: 20098 - DNA, 80 bp, synthetic construct
  misc_feature 1..80: note = Synthetic: >MG916904_3-cand-30-109
  source 1..80: mol_type = other DNA
aggctgttgtgcttgataagtactatgccaaactttacgatgctgttggagtgccttttgtgcgtaatggtaatgtattg

SEQ ID NO: 20099 - DNA, 80 bp, synthetic construct
  misc_feature 1..80: note = Synthetic: >MG916904_4-cand-0-79
  source 1..80: mol_type = other DNA
accaaccaagaacaccggtccagtctgactttgtacgcatttcaaattgtagcgtttcttatgttaacattactagtgaa

SEQ ID NO: 20100 - DNA, 80 bp, synthetic construct
  misc_feature 1..80: note = Synthetic: >MG916904_4-cand-80-159
  source 1..80: mol_type = other DNA
cagctgggtgatataattccagattatttagatgtaaataagactcttaacgaccttcaacagtctagacccaattacac

SEQ ID NO: 20101 - DNA, 80 bp, synthetic construct
  misc_feature 1..80: note = Synthetic: >MG916904_5-cand-0-79
  source 1..80: mol_type = other DNA
gttctatgaaattaatggattaaaagtcttgcaacagtctgctaacaattgctgggttgcatctacattagtgcagctgc

SEQ ID NO: 20102 - DNA, 80 bp, synthetic construct
  misc_feature 1..80: note = Synthetic: >MG916904_5-cand-70-149
  source 1..80: mol_type = other DNA
gtgcagctgcaattgatagattgttatgaaagtactgcttttgatttgtttaaggctggtcgtgttgcacctatggtaca

SEQ ID NO: 20103 - DNA, 80 bp, synthetic construct
  misc_feature 1..80: note = Synthetic: >MG916904_5-cand-220-299
  source 1..80: mol_type = other DNA
cttaaagatctacacacaatgtttatacattgttctgtggaatgtaagtgtggacagacatttgatgatttgagtggttg

SEQ ID NO: 20104 - DNA, 80 bp, synthetic construct
  misc_feature 1..80: note = Synthetic: >MG916904_6-cand-0-79
  source 1..80: mol_type = other DNA
tgttgctagtgctactgattatgatttcaagtatattaaaggtggtaaattacacacttttgatagtggcttggactgtg

SEQ ID NO: 20105 - DNA, 80 bp, synthetic construct
  misc_feature 1..80: note = Synthetic: >MG916904_6-cand-160-239
  source 1..80: mol_type = other DNA
ataatagtaggtgtttctgatgaagctcgcactgtgcctaacataccctctggtgtttacctctttgataagactctggt

SEQ ID NO: 20106 - DNA, 80 bp, synthetic construct
  misc_feature 1..80: note = Synthetic: >MG916904_6-cand-230-309
  source 1..80: mol_type = other DNA
agactctggtctttgctacaaagacggttttttcaccttcaactaattgttatgacattcgcggtccttctgatgcagct

SEQ ID NO: 20107 - DNA, 80 bp, synthetic construct
  misc_feature 1..80: note = Synthetic: >MG916904_7-cand-0-79
  source 1..80: mol_type = other DNA
agaatcgttcacagtctgctaatcgttcgcagtcacgtggacccaaccaaaatgtcaaccaaaaccagaataccaatgga

SEQ ID NO: 20108 - DNA, 80 bp, synthetic construct
  misc_feature 1..80: note = Synthetic: >MG916904_7-cand-120-199
  source 1..80: mol_type = other DNA
ataataatcaacctcagaatcaagttgatatcgtggctgcagttaaggctgctttgcaacagcttggagttggaaatcaa

SEQ ID NO: 20109 - DNA, 80 bp, synthetic construct
  misc_feature 1..80: note = Synthetic: >MG916904_7-cand-170-249
  source 1..80: mol_type = other DNA
gctttgcaacagcttggagttggaaatcaaaatcagggaggaactggtaagaagagcaagagcaactcgggtgtgaatac

SEQ ID NO: 20110 - DNA, 80 bp, synthetic construct
  misc_feature 1..80: note = Synthetic: >MG916904_7-cand-300-379
  source 1..80: mol_type = other DNA
gtaagcaaatggaaagacccgtttggaagcgggtgcccaactcttcagagaatgtcactgcttgtttcggtcctcgtgat

SEQ ID NO: 20111 - DNA, 80 bp, synthetic construct
  misc_feature 1..80: note = Synthetic: >MG916904_8-cand-0-79
  source 1..80: mol_type = other DNA
tgtactactgctgttgtacaaactgcaccattgatggttgcagaggttgttcagcctgaagtggttgcagaattgccaca

SEQ ID NO: 20112 - DNA, 80 bp, synthetic construct
  misc_feature 1..80: note = Synthetic: >MG916904_8-cand-110-189
  source 1..80: mol_type = other DNA
ttacgatgtgagtgtcaattctttactttcacttaaacctgataggtttgtcttttacacagattctacatttatcttag

SEQ ID NO: 20113 - DNA, 80 bp, synthetic construct
  misc_feature 1..80: note = Synthetic: >MG916904_8-cand-350-429
  source 1..80: mol_type = other DNA
tgatgtcacttatgacaagaatgtcatgcgcacagtcactaagatttcaaaacttaaaggtcgtgttttgtcaactgtgc

SEQ ID NO: 20114 - DNA, 80 bp, synthetic construct
  misc_feature 1..80: note = Synthetic: >MG916904_9-cand-0-79
  source 1..80: mol_type = other DNA
ggttgtatgattgacctatgtaaatacttgttctttgctctttgctggctttttattgattggcctttagaacatgtttt

SEQ ID NO: 20115 - DNA, 80 bp, synthetic construct
  misc_feature 1..80: note = Synthetic: >MG916904_9-cand-240-319
  source 1..80: mol_type = other DNA
ttgcttagtttcaactttacaaaatgcgagtcgttgcactactcttgctaatttcacccgttttttcaagacaagtcttc

SEQ ID NO: 20116 - DNA, 80 bp, synthetic construct
  misc_feature 1..80: note = Synthetic: >MG916904_9-cand-340-419
  source 1..80: mol_type = other DNA
tggcagttcaactacatttggtttaccctgtgaagggcttattcaaacccaatctagtgtacaatttgtcccagaccaac

SEQ ID NO: 20117 - DNA, 80 bp, synthetic construct
  misc_feature 1..80: note = Synthetic: >MG916904_9-cand-440-519
  source 1..80: mol_type = other DNA
ttatgcattagtaattatgtgcagacttttcgcatttcttgtccacatggcaaccacacttttatcataagatcaaccac

SEQ ID NO: 20118 - DNA, 80 bp, synthetic construct
  misc_feature 1..80: note = Synthetic: >MH532440_1-cand-0-79
  source 1..80: mol_type = other DNA
gtgaaaaagacaatataagtagtatagcttgtcagcgctctactcatcaactagctgacggcttctactcgttatcacca

SEQ ID NO: 20119 - DNA, 80 bp, synthetic construct
  misc_feature 1..80: note = Synthetic: >MH532440_1-cand-80-159
  source 1..80: mol_type = other DNA
caagtttctaaaaagcagaggacggtggtaacactacctaagcttccagaagtagaaatcgtagatattgtttttaaggt

SEQ ID NO: 20120 - DNA, 80 bp, synthetic construct
  misc_feature 1..80: note = Synthetic: >MH532440_1-cand-170-249
  source 1..80: mol_type = other DNA
gtagaacaatcgttccatgctaatattgccttatttactataaatggtaatgactcttattgtgtaaaaaagccctattt

SEQ ID NO: 20121 - DNA, 80 bp, synthetic construct
  misc_feature 1..80: note = Synthetic: >MH532440_1-cand-250-329
  source 1..80: mol_type = other DNA
tcacataaatcttacattaggatgtgaatattgtatattggctggtaataatatttctttttataccacacctgctttag

SEQ ID NO: 20122 - DNA, 80 bp, synthetic construct
  misc_feature 1..80: note = Synthetic: >MH532440_1-cand-340-419
  source 1..80: mol_type = other DNA
ttctagtgcgtttgacattaactctcttaatgatggcatgtcctttaaccaactttgcattagcaaaagtcaaggtacct

SEQ ID NO: 20123 - DNA, 80 bp, synthetic construct
  misc_feature 1..80: note = Synthetic: >MH532440_1-cand-430-509
  source 1..80: mol_type = other DNA
aatatatggtcatgtcttacaactttcttggaaatttgaagtgggtagaatttattttaccgctgtggaaggtcatgctc

SEQ ID NO: 20124 - DNA, 80 bp, synthetic construct
  misc_feature 1..80: note = Synthetic: >MH532440_1-cand-520-599
  source 1..80: mol_type = other DNA
gaagactaccactgcttctgctatagatacctctactatagttactggtgtctgcactgattataccatctacggcatat

SEQ ID NO: 20125 - DNA, 80 bp, synthetic construct
  misc_feature 1..80: note = Synthetic: >MH532440_1-cand-710-789
  source 1..80: mol_type = other DNA
tacgaggtgttaccttgtgagacctcgtcgcaggtagttgttattaatagcacaattgttggttcgataacatcaaccaa

SEQ ID NO: 20126 - DNA, 80 bp, synthetic construct
  misc_feature 1..80: note = Synthetic: >MH532440_1-cand-800-879
  source 1..80: mol_type = other DNA
ttaggttttcagaaaaccatatcgacacccacgttctactactccaccaatgcaaccgataattgcactgacccagtgtt

SEQ ID NO: 20127 - DNA, 80 bp, synthetic construct
  misc_feature 1..80: note = Synthetic: >MH532440_1-cand-890-969
  source 1..80: mol_type = other DNA
ccagtgtcggtttgcaagaatggtgctatagtagaaacctcattacttcaggacacacgtcccagtatagtatccatgta

SEQ ID NO: 20128 - DNA, 80 bp, synthetic construct
  misc_feature 1..80: note = Synthetic: >MH532440_1-cand-970-1049
  source 1..80: mol_type = other DNA
tgatggagttgttgaaataccctcctcttttagtttgagtgttcaaactgaatacttacagacacaagctgagcaagtgg

SEQ ID NO: 20129 - DNA, 80 bp, synthetic construct
  misc_feature 1..80: note = Synthetic: >MH532440_1-cand-1060-1139
  source 1..80: mol_type = other DNA
tgctcaatatgtgtgccatggtaatgcacggtgtcttcacctattagcgcagtatacctctgcgtgcgctaacattgaat

SEQ ID NO: 20130 - DNA, 80 bp, synthetic construct
  misc_feature 1..80: note = Synthetic: >MH532440_1-cand-1150-1229
  source 1..80: mol_type = other DNA
ttcgagcgcccagcttgatagtagggaaattacaaccatgtttcaaacatcgtctcagtcactagagttggcaaatatta

SEQ ID NO: 20131 - DNA, 80 bp, synthetic construct; identical to SEQ ID NO: 17261
  misc_feature 1..80: note = Synthetic: >MH687935_1-cand-0-79
  source 1..80: mol_type = other DNA

SEQ ID NO: 20132 - DNA, 80 bp, synthetic construct
  misc_feature 1..80: note = Synthetic: >MH687936_1-cand-0-79
  source 1..80: mol_type = other DNA
tcttagaagagtttgattataaaatgcctgttagtggttttaatatgcagggtttattgagcattgtgctctgttgtttt

SEQ ID NO: 20133 - DNA, 80 bp, synthetic construct
  misc_feature 1..80: note = Synthetic: >MH687936_4-cand-0-79
  source 1..80: mol_type = other DNA
gggatgttgatagaaaggctgtgccatatgaaaagcagaacctcacttgcatacgtagaattacgtatgttacagacaac

SEQ ID NO: 20134 - DNA, 80 bp, synthetic construct; identical to SEQ ID NO: 20132
  misc_feature 1..80: note = Synthetic: >MH687939_1-cand-0-79
  source 1..80: mol_type = other DNA

SEQ ID NO: 20135 - DNA, 80 bp, synthetic construct; identical to SEQ ID NO: 20133
  misc_feature 1..80: note = Synthetic: >MH687939_4-cand-0-79
  source 1..80: mol_type = other DNA

SEQ ID NO: 20136 - DNA, 80 bp, synthetic construct; identical to SEQ ID NO: 17261
  misc_feature 1..80: note = Synthetic: >MH687940_1-cand-0-79
  source 1..80: mol_type = other DNA

SEQ ID NO: 20137 - DNA, 80 bp, synthetic construct
  misc_feature 1..80: note = Synthetic: >MH687943_1-cand-0-79
  source 1..80: mol_type = other DNA
atgacaagtttgagacagactgcccattcacacatagcacattaaataattacttgtcgtttggcactctgtgtttttcc

SEQ ID NO: 20138 - DNA, 80 bp, synthetic construct
  misc_feature 1..80: note = Synthetic: >MH687943_1-cand-420-499
  source 1..80: mol_type = other DNA
cacaacaagctgcatttattcaaaacaagattgttggtgttatgagtagtgtgtccagttctaattttactcatactatg

SEQ ID NO: 20139 - DNA, 80 bp, synthetic construct
  misc_feature 1..80: note = Synthetic: >MH687943_2-cand-120-199
  source 1..80: mol_type = other DNA
gtgttactaagacaaacccaccttatagtctttatctttggcattacgacgcagttcgttggtccattaggatttgtaaa

SEQ ID NO: 20140 - DNA, 80 bp, synthetic construct
  misc_feature 1..80: note = Synthetic: >MH687943_2-cand-210-289
  source 1..80: mol_type = other DNA
ttaaagacttgggacaacctaccgctggacatactggaaccgattgtattgtggactttacatttgaacgtgaatccttt

SEQ ID NO: 20141 - DNA, 80 bp, synthetic construct
  misc_feature 1..80: note = Synthetic: >MH687943_2-cand-480-559
  source 1..80: mol_type = other DNA
ctaatggctctatcattgggtacagtgtcgttaccatgcctggtttgtatgacaacctctttcaggtaggtgctgacgga

SEQ ID NO: 20142 - DNA, 80 bp, synthetic construct
  misc_feature 1..80: note = Synthetic: >MH687943_2-cand-570-649
  source 1..80: mol_type = other DNA
ccactttttctttcaacaattggtttgttcttactaatagttctaccattgttgatggtaactttcaatcgtcgcagcca

SEQ ID NO: 20143 - DNA, 80 bp, synthetic construct
  misc_feature 1..80: note = Synthetic: >MH687943_2-cand-850-929
  source 1..80: mol_type = other DNA
gtcgtttttgtgctctaatgagtctaacagaccagtgacatttggcattccatttggtgatacggaggtgccctattact

SEQ ID NO: 20144 - DNA, 80 bp, synthetic construct
  misc_feature 1..80: note = Synthetic: >MH687943_2-cand-940-1019
  source 1..80: mol_type = other DNA
attgtccaataatgtaaatagtaccactaaatttttaggtgtgctgccacctgctgtacgtgaggttgtcgtcacaaagt

SEQ ID NO: 20145 - DNA, 80 bp, synthetic construct
  misc_feature 1..80: note = Synthetic: >MH687944_2-cand-0-79
  source 1..80: mol_type = other DNA
atggagctgattgtattgtggatctctcattcacaggccagacatttcctgctggttctattataggtgtcagttgggtt

SEQ ID NO: 20146 - DNA, 80 bp, synthetic construct
  misc_feature 1..80: note = Synthetic: >MH687944_2-cand-100-179
  source 1..80: mol_type = other DNA
tgacagagttacaatgcactcattttttgtcccgggagctgagaagtgggatgtggttaaggtgtgggcaactagtactt

SEQ ID NO: 20147 - DNA, 80 bp, synthetic construct; identical to SEQ ID NO: 17261
  misc_feature 1..80: note = Synthetic: >MH687947_1-cand-0-79
  source 1..80: mol_type = other DNA

SEQ ID NO: 20148 - DNA, 80 bp, synthetic construct; identical to SEQ ID NO: 20133
  misc_feature 1..80: note = Synthetic: >MH687947_4-cand-0-79
  source 1..80: mol_type = other DNA

SEQ ID NO: 20149 - DNA, 80 bp, synthetic construct; identical to SEQ ID NO: 17260
  misc_feature 1..80: note = Synthetic: >MH687949_1-cand-40-119
  source 1..80: mol_type = other DNA

SEQ ID NO: 20150 - DNA, 80 bp, synthetic construct; identical to SEQ ID NO: 17261
  misc_feature 1..80: note = Synthetic: >MH687949_2-cand-0-79
  source 1..80: mol_type = other DNA

SEQ ID NO: 20151 - DNA, 80 bp, synthetic construct
  misc_feature 1..80: note = Synthetic: >MH687950_2-cand-0-79
  source 1..80: mol_type = other DNA
tttctcagtggccgcttgctagtgacgctcaaggtgacgattttgaatgtgtcaacgactcagagctagaagaggccgag

SEQ ID NO: 20152 - DNA, 80 bp, synthetic construct
  misc_feature 1..80: note = Synthetic: >MH687950_2-cand-70-149
  source 1..80: mol_type = other DNA
agaggccgagtctgtatgtgacttaataactcaagctgttgcagatgctgacaatgactgtgttgatgttgtggagactg

SEQ ID NO: 20153 - DNA, 80 bp, synthetic construct; identical to SEQ ID NO: 20133
  misc_feature 1..80: note = Synthetic: >MH687950_5-cand-0-79
  source 1..80: mol_type = other DNA

SEQ ID NO: 20154 - DNA, 80 bp, synthetic construct; identical to SEQ ID NO: 17260
  misc_feature 1..80: note = Synthetic: >MH687951_1-cand-40-119
  source 1..80: mol_type = other DNA

SEQ ID NO: 20155 - DNA, 80 bp, synthetic construct; identical to SEQ ID NO: 17261
  misc_feature 1..80: note = Synthetic: >MH687951_2-cand-0-79
  source 1..80: mol_type = other DNA

SEQ ID NO: 20156 - DNA, 80 bp, synthetic construct
  misc_feature 1..80: note = Synthetic: >MH687951_5-cand-430-509
  source 1..80: mol_type = other DNA
cgtatcatgaaggtacaatccaagaatgatatagccatgtctggtagcccactagtggatgacccggatgacaagttaga

SEQ ID NO: 20157 - DNA, 80 bp, synthetic construct
  misc_feature 1..80: note = Synthetic: >MH687951_5-cand-620-699
  source 1..80: mol_type = other DNA
aagtcaataccgttatatgtgacctggtcaaagatatgttgggcattccctggttcattaagaaattgggcaccttagcc

SEQ ID NO: 20158 - DNA, 80 bp, synthetic construct
  misc_feature 1..80: note = Synthetic: >MH687952_1-cand-40-119
  source 1..80: mol_type = other DNA
aattctatacctgtcactgtgctgtcgggccaaatattgtttaactgtatggttgctttcatggcagtcatgctgtgctt

SEQ ID NO: 20159 - DNA, 80 bp, synthetic construct; identical to SEQ ID NO: 20132
  misc_feature 1..80: note = Synthetic: >MH687952_2-cand-0-79
  source 1..80: mol_type = other DNA

SEQ ID NO: 20160 - DNA, 80 bp, synthetic construct; identical to SEQ ID NO: 17260
  misc_feature 1..80: note = Synthetic: >MH687953_1-cand-40-119
  source 1..80: mol_type = other DNA

SEQ ID NO: 20161 - DNA, 80 bp, synthetic construct; identical to SEQ ID NO: 17261
  misc_feature 1..80: note = Synthetic: >MH687953_2-cand-0-79
  source 1..80: mol_type = other DNA

SEQ ID NO: 20162 - DNA, 80 bp, synthetic construct; identical to SEQ ID NO: 20156
  misc_feature 1..80: note = Synthetic: >MH687953_5-cand-430-509
  source 1..80: mol_type = other DNA

SEQ ID NO: 20163 - DNA, 80 bp, synthetic construct; identical to SEQ ID NO: 20157
  misc_feature 1..80: note = Synthetic: >MH687953_5-cand-620-699
  source 1..80: mol_type = other DNA

SEQ ID NO: 20164 - DNA, 80 bp, synthetic construct; identical to SEQ ID NO: 20145
  misc_feature 1..80: note = Synthetic: >MH687955_2-cand-0-79
  source 1..80: mol_type = other DNA

SEQ ID NO: 20165 - DNA, 80 bp, synthetic construct; identical to SEQ ID NO: 20146
  misc_feature 1..80: note = Synthetic: >MH687955_2-cand-100-179
  source 1..80: mol_type = other DNA

SEQ ID NO: 20166 - DNA, 80 bp, synthetic construct; identical to SEQ ID NO: 20145
  misc_feature 1..80: note = Synthetic: >MH687956_2-cand-0-79
  source 1..80: mol_type = other DNA

SEQ ID NO: 20167 - DNA, 80 bp, synthetic construct; identical to SEQ ID NO: 20146
  misc_feature 1..80: note = Synthetic: >MH687956_2-cand-100-179
  source 1..80: mol_type = other DNA

SEQ ID NO: 20168 - DNA, 80 bp, synthetic construct; identical to SEQ ID NO: 20145
  misc_feature 1..80: note = Synthetic: >MH687957_2-cand-0-79
  source 1..80: mol_type = other DNA

SEQ ID NO: 20169 - DNA, 80 bp, synthetic construct; identical to SEQ ID NO: 20146
  misc_feature 1..80: note = Synthetic: >MH687957_2-cand-100-179
  source 1..80: mol_type = other DNA

SEQ ID NO: 20170 - DNA, 80 bp, synthetic construct
  misc_feature 1..80: note = Synthetic: >MH687958_2-cand-120-199
  source 1..80: mol_type = other DNA
caaacccaccttatagtctttacctttggcattatgacggcgttcgttggtccattaggatttgcaaatggaccactatt

SEQ ID NO: 20171 - DNA, 80 bp, synthetic construct
  misc_feature 1..80: note = Synthetic: >MH687958_2-cand-300-379
  source 1..80: mol_type = other DNA
tcagttgggttggtaacactgtcacagttcacgacagagttagaatgcactcattttttgtcccgggagctgagaggtgg

SEQ ID NO: 20172 - DNA, 80 bp, synthetic construct
  misc_feature 1..80: note = Synthetic: >MH687958_2-cand-390-469
  source 1..80: mol_type = other DNA
aggtgtgggcaactagtacttgtgccagttcctaccagattgtttacaaacctagtgttttcaatgtgaccactgattct

SEQ ID NO: 20173 - DNA, 80 bp, synthetic construct; identical to SEQ ID NO: 20132
  misc_feature 1..80: note = Synthetic: >MH687959_1-cand-0-79
  source 1..80: mol_type = other DNA

SEQ ID NO: 20174 - DNA, 80 bp, synthetic construct; identical to SEQ ID NO: 20133
  misc_feature 1..80: note = Synthetic: >MH687959_4-cand-0-79
  source 1..80: mol_type = other DNA

SEQ ID NO: 20175 - DNA, 80 bp, synthetic construct; identical to SEQ ID NO: 20170
  misc_feature 1..80: note = Synthetic: >MH687960_2-cand-120-199
  source 1..80: mol_type = other DNA

SEQ ID NO: 20176 - DNA, 80 bp, synthetic construct; identical to SEQ ID NO: 20171
  misc_feature 1..80: note = Synthetic: >MH687960_2-cand-300-379
  source 1..80: mol_type = other DNA

SEQ ID NO: 20177 - DNA, 80 bp, synthetic construct; identical to SEQ ID NO: 20172
  misc_feature 1..80: note = Synthetic: >MH687960_2-cand-390-469
  source 1..80: mol_type = other DNA

SEQ ID NO: 20178 - DNA, 80 bp, synthetic construct; identical to SEQ ID NO: 20133
  misc_feature 1..80: note = Synthetic: >MH687962_3-cand-0-79
  source 1..80: mol_type = other DNA

SEQ ID NO: 20179 - DNA, 80 bp, synthetic construct; identical to SEQ ID NO: 20170
  misc_feature 1..80: note = Synthetic: >MH687965_2-cand-120-199
  source 1..80: mol_type = other DNA

SEQ ID NO: 20180 - DNA, 80 bp, synthetic construct; identical to SEQ ID NO: 20171
  misc_feature 1..80: note = Synthetic: >MH687965_2-cand-300-379
  source 1..80: mol_type = other DNA

SEQ ID NO: 20181 - DNA, 80 bp, synthetic construct; identical to SEQ ID NO: 20172
  misc_feature 1..80: note = Synthetic: >MH687965_2-cand-390-469
  source 1..80: mol_type = other DNA

SEQ ID NO: 20182 - DNA, 80 bp, synthetic construct
  misc_feature 1..80: note = Synthetic: >MH687966_1-cand-0-79
  source 1..80: mol_type = other DNA
ttgctttggaccccgtggaggattcaaaaattttggaacctccgactttgtcaacaatggtgtgaatgcctcaggctacg

SEQ ID NO: 20183 - DNA, 80 bp, synthetic construct
  misc_feature 1..80: note = Synthetic: >MH687966_1-cand-110-189
  source 1..80: mol_type = other DNA
ctgcattgctctttggtggtaatgttactgctaaagatttagccgatggtgttgaaattacatatacttacaaaatggtc

SEQ ID NO: 20184 - DNA, 80 bp, synthetic construct
  misc_feature 1..80: note = Synthetic: >MH687968_1-cand-40-119
  source 1..80: mol_type = other DNA
atagccaacctagtgttggtttttgtttagttcctaaaagaacttggtgtagtaacctaggtagatttgcagcgcatttc

SEQ ID NO: 20185 - DNA, 80 bp, synthetic construct
  misc_feature 1..80: note = Synthetic: >MH687968_3-cand-40-119
  source 1..80: mol_type = other DNA
tcactgcaggtgttgccaaggaagatgatagtgatgcctttaatgtggaaatcttggacgaccccatattggatgaactt

SEQ ID NO: 20186 - DNA, 80 bp, synthetic construct
  misc_feature 1..80: note = Synthetic: >MH687968_5-cand-20-99
  source 1..80: mol_type = other DNA
actaatgctgtagattgtgttagtaattatcttagcgaaattcagtgcaaaactcaatctttgactcctaatacaggtgt

SEQ ID NO: 20187 - DNA, 80 bp, synthetic construct
  misc_feature 1..80: note = Synthetic: >MH687968_6-cand-50-129
  source 1..80: mol_type = other DNA
gaggcatgtcaattaccgttctgttattttcgcaatagcagtagtaattatgtaggcaggtatgacataaaccatggtga

SEQ ID NO: 20188 - DNA, 80 bp, synthetic construct
  misc_feature 1..80: note = Synthetic: >MH687968_6-cand-180-259
  source 1..80: mol_type = other DNA
ttgctgtacagggtgccttttattatgataatgttactactgtttggcctttgctgccttctggacagtgccctacagca

SEQ ID NO: 20189 - DNA, 80 bp, synthetic construct
  misc_feature 1..80: note = Synthetic: >MH687968_6-cand-310-389
  source 1..80: mol_type = other DNA
cattttgttaggtatattgttaggtatagcagtgcttattattgtctttttgattctttattttacagtggataatggtg

SEQ ID NO: 20190 - DNA, 80 bp, synthetic construct
  misc_feature 1..80: note = Synthetic: >MH687970_2-cand-0-79
  source 1..80: mol_type = other DNA
aaactccagtggaggagggtagcgttgaggaacagggtgaggtgcaggctgttgctgatgaaatgggctctgattctatc

SEQ ID NO: 20191 - DNA, 80 bp, synthetic construct
  misc_feature 1..80: note = Synthetic: >MH687970_2-cand-80-159
  source 1..80: mol_type = other DNA
cttgttgacaaggaagatgatgcctttaatgtggacaccttggatgatcccatattggaggaacttcaagagtctattag

SEQ ID NO: 20192 - DNA, 80 bp, synthetic construct
  misc_feature 1..80: note = Synthetic: >MH687970_3-cand-110-189
  source 1..80: mol_type = other DNA
gccttggtttatatatctccgtaaatacggggagaagggttctataactcatggtcataatgcgcgtctctttggtaaga

SEQ ID NO: 20193 - DNA, 80 bp, synthetic construct
  misc_feature 1..80: note = Synthetic: >MH817484_1-cand-40-119
  source 1..80: mol_type = other DNA
tgacttttctgaacactacatatacaacatttcaggagattgtgattgattatattgacattaacaagactattgctgac

SEQ ID NO: 20194 - DNA, 80 bp, synthetic construct
  misc_feature 1..80: note = Synthetic: >MH817484_2-cand-10-89
  source 1..80: mol_type = other DNA
cactggtgaaattaaatatgttaatgtcactcatgttgaaattgttgatgacagtataggggttattaaacctgtttcaa

SEQ ID NO: 20195 - DNA, 80 bp, synthetic construct
  misc_feature 1..80: note = Synthetic: >MH817484_2-cand-170-249
  source 1..80: mol_type = other DNA
gtggattgtgctaagtatgtttgcaatggcaatagacattgtcttacacttctatcacaatatacttcagcttgtcagac

SEQ ID NO: 20196 - DNA, 80 bp, synthetic construct
  misc_feature 1..80: note = Synthetic: >MH817484_3-cand-0-79
  source 1..80: mol_type = other DNA
acagaaactattcttggtggttatttgccctattgtggacatggtgcgaattgtgggtggtataactttgtttattctca

SEQ ID NO: 20197 - DNA, 80 bp, synthetic construct
  misc_feature 1..80: note = Synthetic: >MH817484_3-cand-100-179
  source 1..80: mol_type = other DNA
agtatgaatatataaacacccaaaatctgaacataccgaatgttcatggtgtttattttgacgtgcgtgagcatgattcg

SEQ ID NO: 20198 - DNA, 80 bp, synthetic construct
  misc_feature 1..80: note = Synthetic: >MH817484_3-cand-330-409
  source 1..80: mol_type = other DNA
ataagcacctaccaccaatttactgttgagctaggagatggtggtcaatgtgtgtttaatcagagattttcattggacac

SEQ ID NO: 20199 - DNA, 80 bp, synthetic construct
  misc_feature 1..80: note = Synthetic: >MH817484_3-cand-430-509
  source 1..80: mol_type = other DNA
tctatggcttccagtggactgaaaaatatgtggacatttacttagggggtactattactaaggtgtgggttgacaatgat

SEQ ID NO: 20200 - DNA, 80 bp, synthetic construct
  misc_feature 1..80: note = Synthetic: >MH817484_4-cand-0-79
  source 1..80: mol_type = other DNA
tgtggtatcttttagtaatgacttatactgccctaacattacagcagaagttttaaggtttaatctgaattttagtgata

SEQ ID NO: 20201 - DNA, 80 bp, synthetic construct
  misc_feature 1..80: note = Synthetic: >MH817484_4-cand-90-169
  source 1..80: mol_type = other DNA
tacggcttcatctaatgatgatcagttgcatttcacatttcaggataacacaactgcagctataacatgttatagtagtg

SEQ ID NO: 20202 - DNA, 80 bp, synthetic construct
  misc_feature 1..80: note = Synthetic: >MH817484_4-cand-280-359
  source 1..80: mol_type = other DNA
agacagttcttgggtatattgcctccaactgtacgagagtttgcattcagtagagatggagccgtttttgttaatggcta

SEQ ID NO: 20203 - DNA, 80 bp, synthetic construct
  misc_feature 1..80: note = Synthetic: >MH817484_4-cand-550-629
  source 1..80: mol_type = other DNA
gaattaccagatgggttttattctgctagtatgcttgttaaaaaggatttacctaaaacatttgtaactatgccacagtt

SEQ ID NO: 20204 - DNA, 80 bp, synthetic construct
  misc_feature 1..80: note = Synthetic: >MH817484_4-cand-640-719
  source 1..80: mol_type = other DNA
atgaatgtaacgttgcatgtcgtgttgaacgacactgcgaaaagagctaatattattttggctaaggccaatgaattagc

SEQ ID NO: 20205 - DNA, 80 bp, synthetic construct
  misc_feature 1..80: note = Synthetic: >MH817484_4-cand-730-809
  source 1..80: mol_type = other DNA
gacatacactttgaaatagcacaggctaatggaagtgtggtgaatgttactaatttatgtgtccaagcaagacagtttgc

SEQ ID NO: 20206 - DNA, 80 bp, synthetic construct
  misc_feature 1..80: note = Synthetic: >MH817484_4-cand-910-989
  source 1..80: mol_type = other DNA
aactacctgcagtttgaaactttatgttttgatgtgaacccagctgttgcaggttgtaagtggtcgttagttcatgatgt

SEQ ID NO: 20207 - DNA, 80 bp, synthetic construct
  misc_feature 1..80: note = Synthetic: >MH817484_4-cand-990-1069
  source 1..80: mol_type = other DNA
taagtggcgcacacaatttgcaactattactgtctcttataaacatggttctatgattactactatgccaaaggcacagc

SEQ ID NO: 20208 - DNA, 80 bp, synthetic construct
  misc_feature 1..80: note = Synthetic: >MH817484_4-cand-1070-1149
  source 1..80: mol_type = other DNA
ttggttttcaagacatctccattgtggtgaagaacaaatgcactgattacaacatatatggatttcaaggtacaggtatt

SEQ ID NO: 20209 - DNA, 80 bp, synthetic construct
  misc_feature 1..80: note = Synthetic: >MH924835_1-cand-0-79
  source 1..80: mol_type = other DNA
gcttaaaaaccaagagacgcttgctaattcttttaataaagctgttaggcacatgcaagaaggttttagtgcaacttcac

SEQ ID NO: 20210 - DNA, 80 bp, synthetic construct
  misc_feature 1..80: note = Synthetic: >MH924835_1-cand-100-179
  source 1..80: mol_type = other DNA
gatgtgattaatcagcaatccgcaattttgtctgaagttatggctgctttgaataagaattttggagccatctcatctgt

SEQ ID NO: 20211 - DNA, 80 bp, synthetic construct
  misc_feature 1..80: note = Synthetic: >MH924835_1-cand-200-279
  source 1..80: mol_type = other DNA
agcttgatgctcttgctgctaatgcacaggtagataggctcattacaggtcgactctctgcactatcagtactagcttca

SEQ ID NO: 20212 - DNA, 80 bp, synthetic construct
  misc_feature 1..80: note = Synthetic: >MH924835_1-cand-300-379
  source 1..80: mol_type = other DNA
tagagtggcctatcagcgccaacttgctcaacagaaagttaatgaatgtgtgcgttcacaatcaagtaggaattcttttt

SEQ ID NO: 20213 - DNA, 80 bp, synthetic construct
  misc_feature 1..80: note = Synthetic: >MH924835_2-cand-0-79
  source 1..80: mol_type = other DNA
tagtattaattatggccaccactttaataaaagtgcagtagctataactgcgcctttaggtggtatgagctggtctgcta

SEQ ID NO: 20214 - DNA, 80 bp, synthetic construct
  misc_feature 1..80: note = Synthetic: >MH924835_2-cand-90-169
  source 1..80: mol_type = other DNA
cactgtttattgtaacttttcagatgttacagtttttataacacactgtacaggcgcgggtaatccttgtactctaacag

SEQ ID NO: 20215 - DNA, 80 bp, synthetic construct
  misc_feature 1..80: note = Synthetic: >MH924835_2-cand-180-259
  source 1..80: mol_type = other DNA
tataggtaatattagggtttctgctatggtgagtgggaagttggtttttaattacacacttaccactgcgaaacacccta

SEQ ID NO: 20216 - DNA, 80 bp, synthetic construct
  misc_feature 1..80: note = Synthetic: >MH924835_2-cand-270-349
  source 1..80: mol_type = other DNA
tttgcactgtgttaataattatactagtgtttatttgaatcgagatttggtttatacgtctaacattacagtcgatgtgg

SEQ ID NO: 20217 - DNA, 80 bp, synthetic construct
  misc_feature 1..80: note = Synthetic: >MH924835_2-cand-360-439
  source 1..80: mol_type = other DNA
tgcttatttcaaagcgggcggccctgttacttataaaattatgcaagaatttgaagttcttgcatactttcagaatggta

SEQ ID NO: 20218 - DNA, 80 bp, synthetic construct
  misc_feature 1..80: note = Synthetic: >MH924835_2-cand-450-529
  source 1..80: mol_type = other DNA
tgttatattatgtgataactcacctaagggtttgttagcatgtcagtacaacacaggaaatttttcagatggtttttatc

SEQ ID NO: 20219 - DNA, 80 bp, synthetic construct
  misc_feature 1..80: note = Synthetic: >MH924835_2-cand-540-619
  source 1..80: mol_type = other DNA
ttcaactccttctagagaaaagttttttgtgtatcgtgaaaataatgttactacccagttggtgttacacaatgtgtctt

SEQ ID NO: 20220 - DNA, 80 bp, synthetic construct
  misc_feature 1..80: note = Synthetic: >MH924835_2-cand-630-709
  source 1..80: mol_type = other DNA
gagtggtgcatctcctaacatgggtggtgttaacactatactagtttatcaaacacatactgctcaagatggttattata

SEQ ID NO: 20221 - DNA, 80 bp, synthetic construct
  misc_feature 1..80: note = Synthetic: >MH924835_2-cand-720-799
  source 1..80: mol_type = other DNA
ctctttcttgagtcagtttgtttataaggaatcaaatttcatgtacggctcgtaccatcctaaatgtagttttagacctg

SEQ ID NO: 20222 - DNA, 80 bp, synthetic construct
  misc_feature 1..80: note = Synthetic: >MH924835_2-cand-810-889
  source 1..80: mol_type = other DNA
taatggcctctggtttaactctctttctatatcgattggttacggtcctatacaaggtggctgcaagcaatctgttttta

SEQ ID NO: 20223 - DNA, 80 bp, synthetic construct
  misc_feature 1..80: note = Synthetic: >MH924835_2-cand-860-939
  source 1..80: mol_type = other DNA
tacaaggtggctgcaagcaatctgtttttaataataaagctacttgttgttatgcttattcttatggagggcctattagt

SEQ ID NO: 20224 - DNA, 80 bp, synthetic construct
  misc_feature 1..80: note = Synthetic: >MH938448_1-cand-0-79
  source 1..80: mol_type = other DNA
gctgtgtctctaccattttctcaagcagtcttttctaagcttaattacatagctttgcagactgactttatccaagaaaa

SEQ ID NO: 20225 - DNA, 80 bp, synthetic construct
  misc_feature 1..80: note = Synthetic: >MH938448_1-cand-140-219
  source 1..80: mol_type = other DNA
tgatgttaacaatgcattgcagcacacttctgatgccataaaaaccgttgcaactgctcttaacaaagtgcagaatgctg

SEQ ID NO: 20226 - DNA, 80 bp, synthetic construct
  misc_feature 1..80: note = Synthetic: >MH938448_1-cand-200-279
  source 1..80: mol_type = other DNA
taacaaagtgcagaatgctgttaacacccaaggtgaggcacttgaaaaacttactgctcagcttgcgctcaattttgatg

SEQ ID NO: 20227 - DNA, 80 bp, synthetic construct
  misc_feature 1..80: note = Synthetic: >MH938448_10-cand-0-79
  source 1..80: mol_type = other DNA
gtgtttaatttgtcagccatttatcctttgctgctattcattttgccctttgttaatggtgcttgtaatgatttaggtca

SEQ ID NO: 20228 - DNA, 80 bp, synthetic construct
  misc_feature 1..80: note = Synthetic: >MH938448_10-cand-80-159
  source 1..80: mol_type = other DNA
gcatcgtattcagttgggtttacctgcttcaacaaatgcatttgtgtctggttacttacctaaacctggtaactggactt

SEQ ID NO: 20229 - DNA, 80 bp, synthetic construct
  misc_feature 1..80: note = Synthetic: >MH938448_10-cand-170-249
  source 1..80: mol_type = other DNA
acgacactttgttgttggtactgcacgaggtgtttttatgcgctatttttctaatgctgaacagtgggctcttggtgttg

SEQ ID NO: 20230 - DNA, 80 bp, synthetic construct
  misc_feature 1..80: note = Synthetic: >MH938448_10-cand-260-339
  source 1..80: mol_type = other DNA
tgttacagactttggaaagtatgcgctttatgtccagcaacatggtaatgctggtttcatctatgtgcgtatttgcaagt

SEQ ID NO: 20231 - DNA, 80 bp, synthetic construct
  misc_feature 1..80: note = Synthetic: >MH938448_10-cand-350-429
  source 1..80: mol_type = other DNA
caggtttcctaatgccaacacaccacacccaaccacatcatcagattgtcttcttaatgtcaaggaacgttatgcctttc

SEQ ID NO: 20232 - DNA, 80 bp, synthetic construct
  misc_feature 1..80: note = Synthetic: >MH938448_10-cand-440-519
  source 1..80: mol_type = other DNA
ctactctataattggcgtctcctggacaggtgatgctgttacagtgcatggcttgcgtaagctctacagactttacattc

SEQ ID NO: 20233 - DNA, 80 bp, synthetic construct
  misc_feature 1..80: note = Synthetic: >MH938448_10-cand-530-609
  source 1..80: mol_type = other DNA
agactggaactctgcccagtttgattgccgacacgttgaaacttgcggccatcaaatcgtttctgaccctattactgtca

SEQ ID NO: 20234 - DNA, 80 bp, synthetic construct
  misc_feature 1..80: note = Synthetic: >MH938448_10-cand-620-699
  source 1..80: mol_type = other DNA
tgatgctactgccgttgtcacttcctacactttgtgtgagtcttgtgacggtttccctcatcatgtgtttgcagtacagg

SEQ ID NO: 20235 - DNA, 80 bp, synthetic construct
  misc_feature 1..80: note = Synthetic: >MH938448_10-cand-710-789
  source 1..80: mol_type = other DNA
aatcccagtttcgtttgattttacaaactggtttttcctcacaaatgggtcttctcctttggatgggcgcattgtttcta

SEQ ID NO: 20236 - DNA, 80 bp, synthetic construct
  misc_feature 1..80: note = Synthetic: >MH938448_10-cand-800-879
  source 1..80: mol_type = other DNA
agttatccagtgtctttggcctatacctggcttgacaccgaccgcagggcttatttactttaatgcctcagctaataatg

SEQ ID NO: 20237 - DNA, 80 bp, synthetic construct
  misc_feature 1..80: note = Synthetic: >MH938448_10-cand-890-969
  source 1..80: mol_type = other DNA
taggtgtaacggttatgcaaactctggttttgtagctgaccaccttagactggccattaattctactgattccacttttc

SEQ ID NO: 20238 - DNA, 80 bp, synthetic construct
  misc_feature 1..80: note = Synthetic: >MH938448_10-cand-980-1059
  source 1..80: mol_type = other DNA
tatttcacttgtttcgaatgtgacagcctttaacttctcatgctcaaattcttctgactttgagaacgcgaggactatag

SEQ ID NO: 20239 - DNA, 80 bp, synthetic construct
  misc_feature 1..80: note = Synthetic: >MH938448_10-cand-1030-1109
  source 1..80: mol_type = other DNA
cttctgactttgagaacgcgaggactataggcgtgccgtttggtcgtgtgtatgagccgtattattgctttgtaacacaa

SEQ ID NO: 20240 - DNA, 80 bp, synthetic construct
  misc_feature 1..80: note = Synthetic: >MH938448_11-cand-0-79
  source 1..80: mol_type = other DNA
gtacgccgctgccaaatgaaatcgagatcgttgaaactaactccagacccaactcgcgtgcctcttcacgcgctcggagt

SEQ ID NO: 20241 - DNA, 80 bp, synthetic construct
  misc_feature 1..80: note = Synthetic: >MH938448_11-cand-80-159
  source 1..80: mol_type = other DNA
cagagtaacgatcagaacaggtccaggtctcagtcacgcaaccgatctcaaacaacagaaaacgcccgttctcagagtcg

SEQ ID NO: 20242 - DNA, 80 bp, synthetic construct
  misc_feature 1..80: note = Synthetic: >MH938448_11-cand-170-249
  source 1..80: mol_type = other DNA
caaaataatcagtccaggaacaatgatcaaaatggcagccaacgcagccagtctcgtggtcgatccaattcaaggaatcg

SEQ ID NO: 20243 - DNA, 80 bp, synthetic construct
  misc_feature 1..80: note = Synthetic: >MH938448_11-cand-260-339
  source 1..80: mol_type = other DNA
cagcagcagcagcaacagcgctcaaatcaacaagacgtggttgctgccgtccgtcaggctcttgctgaactaggcttttc

SEQ ID NO: 20244 - DNA, 80 bp, synthetic construct
  misc_feature 1..80: note = Synthetic: >MH938448_11-cand-350-429
  source 1..80: mol_type = other DNA
aacagcggcaagggcaatcggacaccgcgagatgattcaaatcagcagaaccagaccaagaagcagaagcagcctgtcaa

SEQ ID NO: 20245 - DNA, 80 bp, synthetic construct
  misc_feature 1..80: note = Synthetic: >MH938448_11-cand-440-519
  source 1..80: mol_type = other DNA
aagcctgtatggaagcggacaccgcattcacaagaaaatgctgaactctgctttgggccaagggacacttaccagaactt

SEQ ID NO: 20246 - DNA, 80 bp, synthetic construct
  misc_feature 1..80: note = Synthetic: >MH938448_11-cand-530-609
  source 1..80: mol_type = other DNA
cagctagtgcgcctaggcgttgactatcctcattatcctcagattgcagaactcattccatcacaggcagcaatgctctt

SEQ ID NO: 20247 - DNA, 80 bp, synthetic construct
  misc_feature 1..80: note = Synthetic: >MH938448_11-cand-620-699
  source 1..80: mol_type = other DNA
attacagctcatgaggttggtgaccacattcagcttacctatgtctacaagatgcaggtgtctaaggataataagtcctt

SEQ ID NO: 20248 - DNA, 80 bp, synthetic construct
  misc_feature 1..80: note = Synthetic: >MH938448_11-cand-710-789
  source 1..80: mol_type = other DNA
ttgcctcacatttgtgcttatgcgtatgctacagaggatgtcactgcacaatctacaatgccacctcttgaacgcaggct

SEQ ID NO: 20249 - DNA, 80 bp, synthetic construct
  misc_feature 1..80: note = Synthetic: >MH938448_11-cand-800-879
  source 1..80: mol_type = other DNA
attagtgttgaacagtttgaacagaccaatgattctgacactgtggaggaagatcaggatgagcgtgttgagtttgttga

SEQ ID NO: 20250 - DNA, 80 bp, synthetic construct
  misc_feature 1..80: note = Synthetic: >MH938448_11-cand-890-969
  source 1..80: mol_type = other DNA
gacgaagaagcttccgcgtaatcaactaaattacaatgaagctcctcacaaccctccttattgcatttgcaatttctact

SEQ ID NO: 20251 - DNA, 80 bp, synthetic construct
  misc_feature 1..80: note = Synthetic: >MH938448_11-cand-980-1059
  source 1..80: mol_type = other DNA
aacctattgtatatgttagaaatctcactcctgaagattgtgacttctattttggtgacactagcaagctacatagtctc

SEQ ID NO: 20252 - DNA, 80 bp, synthetic construct
  misc_feature 1..80: note = Synthetic: >MH938448_11-cand-1070-1149
  source 1..80: mol_type = other DNA
gtgcaattgaagagacaaagggtatgtacctcaatctggtacgtaccattcaaacccctgatggacctgtaactttccct

SEQ ID NO: 20253 - DNA, 80 bp, synthetic construct
  misc_feature 1..80: note = Synthetic: >MH938448_11-cand-1260-1339
  source 1..80: mol_type = other DNA
agtcgcctcaactacgggggcggctcggtcttgtacacaacggtaagccagtggtcatgtcagtacaagaaagatatgac

SEQ ID NO: 20254 - DNA, 80 bp, synthetic construct
  misc_feature 1..80: note = Synthetic: >MH938448_11-cand-1340-1419
  source 1..80: mol_type = other DNA
catgttgcttagacgagccgaacgcaacaatacctatctaagtgtaacccagaataagcacaaagatacgctatacagta

SEQ ID NO: 20255 - DNA, 80 bp, synthetic construct
  misc_feature 1..80: note = Synthetic: >MH938448_11-cand-1430-1509
  source 1..80: mol_type = other DNA
ttactgtcagacgagcctaacatgctagttagtgcttctaatttacacgatgtaccacaacacaatgctgtttctgttag

SEQ ID NO: 20256 - DNA, 80 bp, synthetic construct
  misc_feature 1..80: note = Synthetic: >MH938448_11-cand-1510-1589
  source 1..80: mol_type = other DNA
aaacctcgggtggagtcgtgctattattagttgcaaaacctagcagggaataacatctcggcatcgacatggatacacaa

SEQ ID NO: 20257 - DNA, 80 bp, synthetic construct
  misc_feature 1..80: note = Synthetic: >MH938448_12-cand-0-79
  source 1..80: mol_type = other DNA
tcttgacgatgaattcgtcgttcttgctaccggtgacatgctgaagctgactgtgggtacttttggagaacgcccttttg

SEQ ID NO: 20258 - DNA, 80 bp, synthetic construct
  misc_feature 1..80: note = Synthetic: >MH938448_12-cand-80-159
  source 1..80: mol_type = other DNA
atcttaagggctggctggtcttttctagttgtgatgctgatggtactgtgcgtgtgtcctttgatggtcttgccggtgct

SEQ ID NO: 20259 - DNA, 80 bp, synthetic construct
  misc_feature 1..80: note = Synthetic: >MH938448_12-cand-160-239
  source 1..80: mol_type = other DNA
gaagtttgtgttgacaactatatgtgtgaccagtccgggaaaccagtgctccctgagagtgtctggaaattccaagatta

SEQ ID NO: 20260 - DNA, 80 bp, synthetic construct
  misc_feature 1..80: note = Synthetic: >MH938448_12-cand-240-319
  source 1..80: mol_type = other DNA
ctttggtgatgctgagactattgttcttgatggcattacctatcgtaaggcatggaatgttatgcgttcccctgtgtctt

SEQ ID NO: 20261 - DNA, 80 bp, synthetic construct
  misc_feature 1..80: note = Synthetic: >MH938448_12-cand-320-399
  source 1..80: mol_type = other DNA
acaagtctcagtctgtggcttctattacttatattgaatggtgtggtgatgtcgcacacacgcttcctagcggttctgtg

SEQ ID NO: 20262 - DNA, 80 bp, synthetic construct
  misc_feature 1..80: note = Synthetic: >MH938448_12-cand-410-489
  source 1..80: mol_type = other DNA
ccaaaccagtttcaaagagtaaagtcgtcgttcttgctgagccttttgccactttttatgcccaggttggtagtccttat

SEQ ID NO: 20263 - DNA, 80 bp, synthetic construct
  misc_feature 1..80: note = Synthetic: >MH938448_12-cand-490-569
  source 1..80: mol_type = other DNA
ttgactaatggtactggcttattggaagtggttgtgaaaccttgttttctccatggttatgtcaagtgtctttgcggcag

SEQ ID NO: 20264 - DNA, 80 bp, synthetic construct
  misc_feature 1..80: note = Synthetic: >MH938448_12-cand-580-659
  source 1..80: mol_type = other DNA
gttgtcggtgattggcatgcaggctataagtctctgtgctgtggtattactcgtactcctacttgtgttgctgctggtta

SEQ ID NO: 20265 - DNA, 80 bp, synthetic construct
  misc_feature 1..80: note = Synthetic: >MH938448_12-cand-660-739
  source 1..80: mol_type = other DNA
tgtggaatctggagatgtcctgcttaccactattggtgctggcaaaggactgaagtattataagggtctcacccttaaat

SEQ ID NO: 20266 - DNA, 80 bp, synthetic construct
  misc_feature 1..80: note = Synthetic: >MH938448_12-cand-740-819
  source 1..80: mol_type = other DNA
atttgggtgatgctgaaaacgtttctctttggcgtattcagaaacttcagcacgttgacggttttgtttcatgtaaccgt

SEQ ID NO: 20267 - DNA, 80 bp, synthetic construct
  misc_feature 1..80: note = Synthetic: >MH938448_12-cand-820-899
  source 1..80: mol_type = other DNA
tttaaggatgagtattgtgccagcacagattcctgtagttttgagaataccagctcacttgctgtggctcttaagtatgg

SEQ ID NO: 20268 - DNA, 80 bp, synthetic construct
  misc_feature 1..80: note = Synthetic: >MH938448_12-cand-910-989
  source 1..80: mol_type = other DNA
ggccagtgccttgacagcgttaaagatgccattggtaatggtcatgttgacgttggctttgctgtttttgacacatttga

SEQ ID NO: 20269 - DNA, 80 bp, synthetic construct
  misc_feature 1..80: note = Synthetic: >MH938448_12-cand-990-1069
  source 1..80: mol_type = other DNA
ctcaatttgcgacaagcctaagtggctttgcaagttgggttctcttggtgagtcaatctggtcacagttcaaaacctttg

SEQ ID NO: 20270 - DNA, 80 bp, synthetic construct
  misc_feature 1..80: note = Synthetic: >MH938448_12-cand-1070-1149
  source 1..80: mol_type = other DNA
cacgtgaagtctttaagagctcgctggcacttttggaccttgttaaattccttcgtgaagttacatgtgttgtccttaat

SEQ ID NO: 20271 - DNA, 80 bp, synthetic construct
  misc_feature 1..80: note = Synthetic: >MH938448_12-cand-1150-1229
  source 1..80: mol_type = other DNA
ggtgcttttgagctcattgcaaatgttccaccaacttttgcttcattgtttgagcatctcaagactctgttgtgctcctg

SEQ ID NO: 20272 - DNA, 80 bp, synthetic construct
  misc_feature 1..80: note = Synthetic: >MH938448_12-cand-1230-1309
  source 1..80: mol_type = other DNA
tgctgaactgttcattgaagagtgtaagttggctggcgttgcctttaaacgttttggagactatgttctttttgacaatg

SEQ ID NO: 20273 - DNA, 80 bp, synthetic construct
  misc_feature 1..80: note = Synthetic: >MH938448_12-cand-1310-1389
  source 1..80: mol_type = other DNA
ctttgtgccattttgtcagtgttaagatcaagggtactaagcaggatgggctgaaaaatgctacgtatgctagtgccatt

SEQ ID NO: 20274 - DNA, 80 bp, synthetic construct
  misc_feature 1..80: note = Synthetic: >MH938448_12-cand-1390-1469
  source 1..80: mol_type = other DNA
tttggtcctactaaacgtgttaaggtaacacgtgtcgaaaagtgtgatgtcagtcttgttcttcgtgaccatgtgccacc

SEQ ID NO: 20275 - DNA, 80 bp, synthetic construct
  misc_feature 1..80: note = Synthetic: >MH938448_12-cand-1470-1549
  source 1..80: mol_type = other DNA
gcctgaaagtggtactgctagtgtcattggtggacaagccttctacactgatggttccaattattggcttatgtctgacc

SEQ ID NO: 20276 - DNA, 80 bp, synthetic construct
  misc_feature 1..80: note = Synthetic: >MH938448_12-cand-1550-1629
  source 1..80: mol_type = other DNA
ataatgctgttatggaatcacctgttttcaaagtcgaaaccgttatgtgccctgagattcttgagaatgttgatggcgga

SEQ ID NO: 20277 - DNA, 80 bp, synthetic construct
  misc_feature 1..80: note = Synthetic: >MH938448_12-cand-1630-1709
  source 1..80: mol_type = other DNA
gacatattccgacgtgtcgtgagtactgtcactgatgttgttgacttttgcaagtctctcaaagtgcactttgggcttga

SEQ ID NO: 20278 - DNA, 80 bp, synthetic construct
  misc_feature 1..80: note = Synthetic: >MH938448_12-cand-1710-1789
  source 1..80: mol_type = other DNA
gggctttgttattacggcagctaaaaagtttaaggctttagctcgtacactcaccgagttgtacaatgaatttgcaatta

SEQ ID NO: 20279 - DNA, 80 bp, synthetic construct
  misc_feature 1..80: note = Synthetic: >MH938448_12-cand-1790-1869
  source 1..80: mol_type = other DNA
ctgtgtcagccatagtgaaggtcgcaaatctgaacttcacatattatgcatttgacaagcctatggtcaaccttaatggt

SEQ ID NO: 20280 - DNA, 80 bp, synthetic construct
  misc_feature 1..80: note = Synthetic: >MH938448_12-cand-1870-1949
  source 1..80: mol_type = other DNA
acattgtgccatgttgagttggtcgagccacctaacactttgcttactgaggctgcagttgctgattttatggtgtttaa

SEQ ID NO: 20281 - DNA, 80 bp, synthetic construct
  misc_feature 1..80: note = Synthetic: >MH938448_12-cand-1950-2029
  source 1..80: mol_type = other DNA
gcagccagatactgctgttacacctgtcaaaattgaaaccgactcttgtgaacttcaagaagtagagtttgttcagccag

SEQ ID NO: 20282 - DNA, 80 bp, synthetic construct
  misc_feature 1..80: note = Synthetic: >MH938448_12-cand-2030-2109
  source 1..80: mol_type = other DNA
ctgaaggtggtggtattaagataatagatcactatgccttctatgagaagaatgggttttattatcctgcatcatttgat

SEQ ID NO: 20283 - DNA, 80 bp, synthetic construct
  misc_feature 1..80: note = Synthetic: >MH938448_12-cand-2120-2199
  source 1..80: mol_type = other DNA
acattgcctatcgcaagaagggtggcggtaatgtctcttttgcagaagaaatgtctgttagagagattgaccctgctcac

SEQ ID NO: 20284 - DNA, 80 bp, synthetic construct
  misc_feature 1..80: note = Synthetic: >MH938448_2-cand-150-229
  source 1..80: mol_type = other DNA
tatgcccttgctgtacatgatctttttggtctgttttggcaataagtgggtgcgtttctttatgtgctatttcattctgc

SEQ ID NO: 20285 - DNA, 80 bp, synthetic construct
  misc_feature 1..80: note = Synthetic: >MH938448_2-cand-270-349
  source 1..80: mol_type = other DNA
ctctatttgggctttacacattgttccatttgacatcttttgcgatgaaatagttgtttgttgggtggtttactccattc

SEQ ID NO: 20286 - DNA, 80 bp, synthetic construct
  misc_feature 1..80: note = Synthetic: >MH938448_3-cand-150-229
  source 1..80: mol_type = other DNA
acacctttacatcgcgtgtagcatcagttaacggtgttggtgttgttgtcaatgttgacgttcccagcgttgttccaaaa

SEQ ID NO: 20287 - DNA, 80 bp, synthetic construct
  misc_feature 1..80: note = Synthetic: >MH938448_3-cand-270-349
  source 1..80: mol_type = other DNA
gtgatgtgggccaaggtcattatgctgtggttgacagtaagtctaacaactcttttgatggcgacgaagttaaacctgct

SEQ ID NO: 20288 - DNA, 80 bp, synthetic construct
  misc_feature 1..80: note = Synthetic: >MH938448_3-cand-390-469
  source 1..80: mol_type = other DNA
actctgtttttaccactaaacccaagaaagaagaaccttgcaaagcagagtctcccgcatctttgcaacctagtgttcca

SEQ ID NO: 20289 - DNA, 80 bp, synthetic construct
  misc_feature 1..80: note = Synthetic: >MH938448_4-cand-0-79
  source 1..80: mol_type = other DNA
cactcaatccatttgcttttgaggttgtcgactacagcggtgttaaaattcttaaacaggacagtaataactgctgggcc

SEQ ID NO: 20290 - DNA, 80 bp, synthetic construct
  misc_feature 1..80: note = Synthetic: >MH938448_4-cand-100-179
  source 1..80: mol_type = other DNA
gcaattgttggacttgctggatacgcctgcaatggccctgtataagtgtggccgcgtcgcacctcttgtgcaacaatgtt

SEQ ID NO: 20291 - DNA, 80 bp, synthetic construct
  misc_feature 1..80: note = Synthetic: >MH938448_4-cand-200-279
  source 1..80: mol_type = other DNA
aagggatctatgggtgatgtcactgagtgtctcgaacgtatgcttaaggatgttaagtcctgtgttatagtgtttgaagg

SEQ ID NO: 20292 - DNA, 80 bp, synthetic construct
  misc_feature 1..80: note = Synthetic: >MH938448_4-cand-300-379
  source 1..80: mol_type = other DNA
ttgaccgtccaatggaaggttgtgtctttaggttcatgcctaattctgagcctatggagcagtggtgtgacaagtgtaat

SEQ ID NO: 20293 - DNA, 80 bp, synthetic construct
  misc_feature 1..80: note = Synthetic: >MH938448_4-cand-520-599
  source 1..80: mol_type = other DNA
taacgtctaccacactggtaaggctgttgatggttttggcactcatcctattaatgatgaatgcttgcatacctttgcag

SEQ ID NO: 20294 - DNA, 80 bp, synthetic construct
  misc_feature 1..80: note = Synthetic: >MH938448_5-cand-0-79
  source 1..80: mol_type = other DNA
attttgttcgtaaagagggtggtgctgttagaccatttaggtggatgctttgcgctgctctcattcttgtgtgcctgtac

SEQ ID NO: 20295 - DNA, 80 bp, synthetic construct
  misc_feature 1..80: note = Synthetic: >MH938448_5-cand-210-289
  source 1..80: mol_type = other DNA
actttgatggttggtatgaaagcaagtttggtcatgtccccattaagaatattaaatgtcctattgttgttggtgtttct

SEQ ID NO: 20296 - DNA, 80 bp, synthetic construct
  misc_feature 1..80: note = Synthetic: >MH938448_5-cand-310-389
  source 1..80: mol_type = other DNA
aggcattccttctggtgttgcgcttgttggtaagacacttgtttttgccgttaagactatctttggtgaaactggcaatt

SEQ ID NO: 20297 - DNA, 80 bp, synthetic construct
  misc_feature 1..80: note = Synthetic: >MH938448_5-cand-410-489
  source 1..80: mol_type = other DNA
actaacattggtagctgtttgttcacttctgcttgcactattctttctggtcttggtggtacacatacgtactgctacaa

SEQ ID NO: 20298 - DNA, 80 bp, synthetic construct
  misc_feature 1..80: note = Synthetic: >MH938448_5-cand-510-589
  source 1..80: mol_type = other DNA
cacgtgcttatagtgagcttgtacctaacacttactataagatggaggatggccagcatattattctaccagaagtgctt

SEQ ID NO: 20299 - DNA, 80 bp, synthetic construct
  misc_feature 1..80: note = Synthetic: >MH938448_5-cand-600-679
  source 1..80: mol_type = other DNA
tcggttttagagctgtacgcactatggcaaatacatattgtagagccggacagtgtgtcgaatctaaggctggtgtttgt

SEQ ID NO: 20300 - DNA, 80 bp, synthetic construct
  misc_feature 1..80: note = Synthetic: >MH938448_6-cand-0-79
  source 1..80: mol_type = other DNA
tatgtataccattttgtccgcgaaaactggtgttgacgtgcctcgtgtgcttgctgctatacagaggctgtctaaaggtt

SEQ ID NO: 20301 - DNA, 80 bp, synthetic construct
  misc_feature 1..80: note = Synthetic: >MH938448_6-cand-100-179
  source 1..80: mol_type = other DNA
ggttatgcatcattgacagatgaatttactactggtgaagtcataaagcaaatgtatggtgtcacgctgcagagttccaa

SEQ ID NO: 20302 - DNA, 80 bp, synthetic construct
  misc_feature 1..80: note = Synthetic: >MH938448_6-cand-200-279
  source 1..80: mol_type = other DNA
acttggttgctgtgggcttgtttgtctttatgttctggtcagagttcctttcttactctactttgttttggatcaatgcc

SEQ ID NO: 20303 - DNA, 80 bp, synthetic construct
  misc_feature 1..80: note = Synthetic: >MH938448_6-cand-300-379
  source 1..80: mol_type = other DNA
tttgggcctttgtggtttctcagtctttttgacagcgttccttaagcacaaacttatgtttctttacacctttttgattc

SEQ ID NO: 20304 - DNA, 80 bp, synthetic construct
  misc_feature 1..80: note = Synthetic: >MH938448_6-cand-510-589
  source 1..80: mol_type = other DNA
ttgtagcttggttagtggtcttcacctttaccgttttaaccctgtgaaccttggctcatgtgtaactttgattatgtcac

SEQ ID NO: 20305 - DNA, 80 bp, synthetic construct
  misc_feature 1..80: note = Synthetic: >MH938448_6-cand-610-689
  source 1..80: mol_type = other DNA
tactggtatgttacagactacttgtcacttatgatgatgcttttgctcaatatgtcaagtacttggtatattggtgtggt

SEQ ID NO: 20306 - DNA, 80 bp, synthetic construct
  misc_feature 1..80: note = Synthetic: >MH938448_7-cand-110-189
  source 1..80: mol_type = other DNA
agcttagtacaaagagtggtaattttactgacactatttgtgtttctactaacagatttactgctctttgggacctgaaa

SEQ ID NO: 20307 - DNA, 80 bp, synthetic construct
  misc_feature 1..80: note = Synthetic: >MH938448_7-cand-210-289
  source 1..80: mol_type = other DNA
ctttggtgttcgcactggtgattgccccttttcatacgaccaacttaataattttgttaagtttggtagtgtttgctttt

SEQ ID NO: 20308 - DNA, 80 bp, synthetic construct
  misc_feature 1..80: note = Synthetic: >MH938448_7-cand-310-389
  source 1..80: mol_type = other DNA
tgtgcaatgcctgtcaatgctatcaactacattgacatttcataccctataggtgtgctgtatgtttcacactcaccagg

SEQ ID NO: 20309 - DNA, 80 bp, synthetic construct
  misc_feature 1..80: note = Synthetic: >MH938448_7-cand-410-489
  source 1..80: mol_type = other DNA
caaagggttttgtccaacgtctgggtttcttggatcccagtgtgttacatcttaatgtctgtactgagtacaatgtttac

SEQ ID NO: 20310 - DNA, 80 bp, synthetic construct
  misc_feature 1..80: note = Synthetic: >MH938448_7-cand-510-589
  source 1..80: mol_type = other DNA
cattaacaaagttaatggcacgtaccgaacaggtatcgtttacactgacacgtctggctcgttggtcagttttaagaatg

SEQ ID NO: 20311 - DNA, 80 bp, synthetic construct
  misc_feature 1..80: note = Synthetic: >MH938448_7-cand-600-679
  source 1..80: mol_type = other DNA
tgaggttttcagtgttacaccttgtcaaacgtctgttcagtatgctgttgtcgctgactctatagtcggtgttatgtcag

SEQ ID NO: 20312 - DNA, 80 bp, synthetic construct
  misc_feature 1..80: note = Synthetic: >MH938448_7-cand-700-779
  source 1..80: mol_type = other DNA
gcttttaattatacccttgaaacacctatgttttactactctgcaaacactaaccgtaattgcacagacccagtcctcac

SEQ ID NO: 20313 - DNA, 80 bp, synthetic construct
  misc_feature 1..80: note = Synthetic: >MH938448_8-cand-0-79
  source 1..80: mol_type = other DNA
aacatgatcgtgaccttcttactaaggcttataagagtgtctttgctaatgctggtgttccacttacacctttgcttagt

SEQ ID NO: 20314 - DNA, 80 bp, synthetic construct
  misc_feature 1..80: note = Synthetic: >MH938448_8-cand-90-169
  source 1..80: mol_type = other DNA
tcaatgttcctcttactacatcattggaagtttttctcaaagaggttgatgacagagtttgcaaatgcttttgttactct

SEQ ID NO: 20315 - DNA, 80 bp, synthetic construct
  misc_feature 1..80: note = Synthetic: >MH938448_8-cand-180-259
  source 1..80: mol_type = other DNA
tcaaggctatttgcgactatgttgcatcatttacacccgttgttgagactccagttgaagagactgtggcaccatttgtt

SEQ ID NO: 20316 - DNA, 80 bp, synthetic construct
  misc_feature 1..80: note = Synthetic: >MH938448_8-cand-270-349
  source 1..80: mol_type = other DNA
cttaccttgtagaaggtaagactgagttttatgactgtgacattgattctctagttcttaagccatttgataggtttgtg

SEQ ID NO: 20317 - DNA, 80 bp, synthetic construct
  misc_feature 1..80: note = Synthetic: >MH938448_8-cand-360-439
  source 1..80: mol_type = other DNA
atgaagacctcaaactttcaggtttggctaagagctttgatgactttgttggaggtgctgttggcgatgctttacaacgt

SEQ ID NO: 20318 - DNA, 80 bp, synthetic construct
  misc_feature 1..80: note = Synthetic: >MH938448_8-cand-450-529
  source 1..80: mol_type = other DNA
ttcctgctggtaatatcgtcacttataagaatcctagagacaatggtacgtttttccttgtgactttcgcatcgttgccg

SEQ ID NO: 20319 - DNA, 80 bp, synthetic construct
  misc_feature 1..80: note = Synthetic: >MH938448_8-cand-540-619
  source 1..80: mol_type = other DNA
ctaagaattatgataaaaatttaactcgtgttgttaacaagctgtttaagttgaagggtacagccgttatgactgttcct

SEQ ID NO: 20320 - DNA, 80 bp, synthetic construct
  misc_feature 1..80: note = Synthetic: >MH938448_8-cand-630-709
  source 1..80: mol_type = other DNA
tgttccctaaggttcttcctgcttgtactgctttttgggtttgcgacgatactaaggatattgttgcgcgtcaatttgtt

SEQ ID NO: 20321 - DNA, 80 bp, synthetic construct
  misc_feature 1..80: note = Synthetic: >MH938448_9-cand-0-79
  source 1..80: mol_type = other DNA
tcatgttgttcctattactcacttcaaccttggtgttaattacttgtttagtagcatttttgtctactatttcgctactt

SEQ ID NO: 20322 - DNA, 80 bp, synthetic construct
  misc_feature 1..80: note = Synthetic: >MH938448_9-cand-90-169
  source 1..80: mol_type = other DNA
atcttttaaagtcaatgtggcctgttttatttgcaggttacttttggtttttgcttatgcacctttactttactatgtag

SEQ ID NO: 20323 - DNA, 80 bp, synthetic construct
  misc_feature 1..80: note = Synthetic: >MH938448_9-cand-180-259
  source 1..80: mol_type = other DNA
tgatggcagtattgttttagttgtgcttgtttgccggttttggtacttagggtactatgcactgcgctttaacagtttca

SEQ ID NO: 20324 - DNA, 80 bp, synthetic construct
  misc_feature 1..80: note = Synthetic: >MH938448_9-cand-270-349
  source 1..80: mol_type = other DNA
acttaacagttcaaccctagcttgggtttatggtaagtgttggtattttgcacttgactattatgtttgccttcgtggag

SEQ ID NO: 20325 - DNA, 80 bp, synthetic construct
  misc_feature 1..80: note = Synthetic: >MH938448_9-cand-360-439
  source 1..80: mol_type = other DNA
tgtcaagtttggaccacattttatcccttttgttagtgataaaaatctctacattgctgttaggggtaggtgtcaaaagg

SEQ ID NO: 20326 - DNA, 80 bp, synthetic construct
  misc_feature 1..80: note = Synthetic: >MH938448_9-cand-580-659
  source 1..80: mol_type = other DNA
taatagcattctcctcaactaaaccatgttgtttacgttgattaatgacaatggttttgtcttgaatgccattttgtggg

SEQ ID NO: 20327 - DNA, 80 bp, synthetic construct
  misc_feature 1..80: note = Synthetic: >MH938448_9-cand-670-749
  source 1..80: mol_type = other DNA
cttatttattattatactctgtattgcatttataaagctggtccaactatgtttcgcttgccaccaattgatgacaggcg

SEQ ID NO: 20328 - DNA, 80 bp, synthetic construct
  misc_feature 1..80: note = Synthetic: >MH938448_9-cand-750-829
  source 1..80: mol_type = other DNA
ctgtttatagaccagtttataatgcatatgcaatttacagagattttatgcgaatagaccccgctccagtacttgatgtc

SEQ ID NO: 20329 - DNA, 80 bp, synthetic construct
  misc_feature 1..80: note = Synthetic: >MH938448_9-cand-840-919
  source 1..80: mol_type = other DNA
gtctgacaatagtactattcccgttggggaggtggtggaacacctccgtaattggaattttgcatggaacgtcatcttga

SEQ ID NO: 20330 - DNA, 80 bp, synthetic construct
  misc_feature 1..80: note = Synthetic: >MH938449_1-cand-0-79
  source 1..80: mol_type = other DNA
cagtttgcatctttacagatttagtactagcaccgtaggttctgttgctacattgtttatgtcacttggtgccacagttt

SEQ ID NO: 20331 - DNA, 80 bp, synthetic construct
  misc_feature 1..80: note = Synthetic: >MH938449_10-cand-0-79
  source 1..80: mol_type = other DNA
gtgggggatgctgaaaatgtttcagtctggcgtattatcaagacacacaacgttgatggttttgtgtctgataatcgctt

SEQ ID NO: 20332 - DNA, 80 bp, synthetic construct
  misc_feature 1..80: note = Synthetic: >MH938449_10-cand-360-439
  source 1..80: mol_type = other DNA
gttgattttatcaagagcattgctaatgcaacttttgtcgttgttggtggtgcttttgacattgttgctagtgtaccaaa

SEQ ID NO: 20333 - DNA, 80 bp, synthetic construct
  misc_feature 1..80: note = Synthetic: >MH938449_10-cand-450-529
  source 1..80: mol_type = other DNA
gaagcgtttgaatacttgcgtaagctgatcaaacgctgtgctgaattcttcattgaagaattcaaagttgcaggtgttgt

SEQ ID NO: 20334 - DNA, 80 bp, synthetic construct
  misc_feature 1..80: note = Synthetic: >MH938449_11-cand-0-79
  source 1..80: mol_type = other DNA
cacctggttttgctaaaaacctcggtttttatgatgccagtgttttgcacttgaacgtgtgcactgagtataatatctat

SEQ ID NO: 20335 - DNA, 80 bp, synthetic construct
  misc_feature 1..80: note = Synthetic: >MH938449_11-cand-220-299
  source 1..80: mol_type = other DNA
ctcacgccaatttgctgtgattaatgacaacattgtaggggttatttcagctagcagtgatattaacgtgagtttcaatc

SEQ ID NO: 20336 - DNA, 80 bp, synthetic construct
  misc_feature 1..80: note = Synthetic: >MH938449_11-cand-310-389
  source 1..80: mol_type = other DNA
gacccctacgttctattaccatgctaacacatcgcgtaattgtactaacccagttcttacctatgccacaattggaattt

SEQ ID NO: 20337 - DNA, 80 bp, synthetic construct
  misc_feature 1..80: note = Synthetic: >MH938449_11-cand-400-479
  source 1..80: mol_type = other DNA
tgctatgggttatgtttaccctacagctattaaggaaccacctgcgacccctattgttactggtaacatctcaatacctg

SEQ ID NO: 20338 - DNA, 80 bp, synthetic construct
  misc_feature 1..80: note = Synthetic: >MH938449_11-cand-490-569
  source 1..80: mol_type = other DNA
agtttctgttcaagctgagtatgtgcaagtttctcttagaccggttgttgtggattgtgccacttttgtctgcaacggca

SEQ ID NO: 20339 - DNA, 80 bp, synthetic construct
  misc_feature 1..80: note = Synthetic: >MH938449_11-cand-580-659
  source 1..80: mol_type = other DNA
tttgcagttacttaaacagtatgtaactgcctgttcatctatagaaaatgcacttgcactcaatgctagacttgagagtc

SEQ ID NO: 20340 - DNA, 80 bp, synthetic construct
  misc_feature 1..80: note = Synthetic: >MH938449_11-cand-670-749
  source 1..80: mol_type = other DNA
ctcacttctcacctatgatgaagctgcttataggcaggcgctagaactcaaaacttctcaattccagaatgacttcaata

SEQ ID NO: 20341 - DNA, 80 bp, synthetic construct
  misc_feature 1..80: note = Synthetic: >MH938449_11-cand-730-809
  source 1..80: mol_type = other DNA
attccagaatgacttcaatatttctgctgttttgcctgctggtgaaaataaaggcagttttattgaggacttgctttttg

SEQ ID NO: 20342 - DNA, 80 bp, synthetic construct
  misc_feature 1..80: note = Synthetic: >MH938449_12-cand-0-79
  source 1..80: mol_type = other DNA
cagtgatgattggtttgttccaaattcacatgagtcgtgtattccctcaaagcaaacccacttttcacccagatgtgcca

SEQ ID NO: 20343 - DNA, 80 bp, synthetic construct
  misc_feature 1..80: note = Synthetic: >MH938449_12-cand-530-609
  source 1..80: mol_type = other DNA
gtgcgtcgtattgaacttatcaacacggacagcctatacatctttgccgtagagcctgttgtaggtattactaatattaa

SEQ ID NO: 20344 - DNA, 80 bp, synthetic construct
  misc_feature 1..80: note = Synthetic: >MH938449_12-cand-620-699
  source 1..80: mol_type = other DNA
tcttctcaacaacacgaatatgtcgttgaaattaattaactttggctatgccattgttaatataagcctatgggtgttaa

SEQ ID NO: 20345 - DNA, 80 bp, synthetic construct
  misc_feature 1..80: note = Synthetic: >MH938449_13-cand-260-339
  source 1..80: mol_type = other DNA
gtcatagcacacctaagaggtctaactcttctcaacctgcggagaagaagaacatcagacaagtcgacaaacctacctgg

SEQ ID NO: 20346 - DNA, 80 bp, synthetic construct
  misc_feature 1..80: note = Synthetic: >MH938449_13-cand-440-519
  source 1..80: mol_type = other DNA
actaccctcacttcccgcaaattgcagaacttgtaccaactcaggctgcattgcttttcggaagtgaaattacagcacat

SEQ ID NO: 20347 - DNA, 80 bp, synthetic construct
  misc_feature 1..80: note = Synthetic: >MH938449_13-cand-710-789
  source 1..80: mol_type = other DNA
atggcagtgttgatgctgttgaagatgtcattgttgaagctgactctgcagatggtgaaggccaatttgaagaagtagtt

SEQ ID NO: 20348 - DNA, 80 bp, synthetic construct
  misc_feature 1..80: note = Synthetic: >MH938449_13-cand-1040-1119
  source 1..80: mol_type = other DNA
accagaagggcctgtcataattcccattgaccgtcctaataatcatggtgacatctatgcctcaactcctgctgattcag

SEQ ID NO: 20349 - DNA, 80 bp, synthetic construct
  misc_feature 1..80: note = Synthetic: >MH938449_14-cand-10-89
  source 1..80: mol_type = other DNA
ttatagttactcttctcaactaaaatgaatttgtttatagttgtgttgtgtgccttgatgtctctagttagaccccaacg

SEQ ID NO: 20350 - DNA, 80 bp, synthetic construct
  misc_feature 1..80: note = Synthetic: >MH938449_14-cand-90-169
  source 1..80: mol_type = other DNA
ttcaccatgtgctcctactacaggaatgaaaatacagctcggtttaccccctaataggactgtttatgtttctggttacc

SEQ ID NO: 20351 - DNA, 80 bp, synthetic construct
  misc_feature 1..80: note = Synthetic: >MH938449_14-cand-250-329
  source 1..80: mol_type = other DNA
gctgtttacatccgttacattcaaggaggttatgccatgtcttttggtgttggtccttcttcagtccaaaattttaatgg

SEQ ID NO: 20352 - DNA, 80 bp, synthetic construct
  misc_feature 1..80: note = Synthetic: >MH938449_14-cand-330-409
  source 1..80: mol_type = other DNA
ttactcactttatgtcacacagaagaatgatgtgcttgtgggcaaccgccaaggtgctatggacatacgtatctgtaagt

SEQ ID NO: 20353 - DNA, 80 bp, synthetic construct
  misc_feature 1..80: note = Synthetic: >MH938449_14-cand-410-489
  source 1..80: mol_type = other DNA
acaagaaaaacaaagatcctgcgcaacgaccttcaggtggtctgacagacactgaaggttgcctttttgcagacacaatt

SEQ ID NO: 20354 - DNA, 80 bp, synthetic construct
  misc_feature 1..80: note = Synthetic: >MH938449_14-cand-490-569
  source 1..80: mol_type = other DNA
tactttgcatttggcactggaattccacacggctacgaagtcataggtgtgtcatggactggtgatgcagtcactgttca

SEQ ID NO: 20355 - DNA, 80 bp, synthetic construct
  misc_feature 1..80: note = Synthetic: >MH938449_14-cand-580-659
  source 1..80: mol_type = other DNA
aaaatgtttcgcatctttgtgcctggtgctgataagtgggattctgttagtgtaaattgtcaaaattcttggtcttgtgc

SEQ ID NO: 20356 - DNA, 80 bp, synthetic construct
  misc_feature 1..80: note = Synthetic: >MH938449_14-cand-660-739
  source 1..80: mol_type = other DNA
tcaacagataattactgaaccatccaccataattgcaaccactgcaccaaatggaaccattgtcaattacactcggtgtg

SEQ ID NO: 20357 - DNA, 80 bp, synthetic construct
  misc_feature 1..80: note = Synthetic: >MH938449_14-cand-740-819
  source 1..80: mol_type = other DNA
ctaattgcaaaggtttccctgatcatgtgtttgcagtggaagagggtggtgaaataccagtgtcattttcatttggcaac

SEQ ID NO: 20358 - DNA, 80 bp, synthetic construct
  misc_feature 1..80: note = Synthetic: >MH938449_14-cand-820-899
  source 1..80: mol_type = other DNA
tggttttacctttctgatggtgcatcacccattggtggcaggttttactcttctcagcctcttaagcttatgtgcctgtg

SEQ ID NO: 20359 - DNA, 80 bp, synthetic construct
  misc_feature 1..80: note = Synthetic: >MH938449_14-cand-910-989
  source 1..80: mol_type = other DNA
gcattggtttctaatacaggtgtcatctacttcaattactcaaagcatgaccttactgggcataatggtgattttgccaa

SEQ ID NO: 20360 - DNA, 80 bp, synthetic construct
  misc_feature 1..80: note = Synthetic: >MH938449_14-cand-990-1069
  source 1..80: mol_type = other DNA
gcgctgtaatggttattttgaggaagattttgtggcaacacatctacgttttgccatcaattcaactggacacctgcaga

SEQ ID NO: 20361 - DNA, 80 bp, synthetic construct
  misc_feature 1..80: note = Synthetic: >MH938449_14-cand-1320-1399
  source 1..80: mol_type = other DNA
ttaccgattgttttcagttggaccagttgaaggtgttcttttaaacctaactagtttgaccggttctgatttttggaccg

SEQ ID NO: 20362 - DNA, 80 bp, synthetic construct
  misc_feature 1..80: note = Synthetic: >MH938449_14-cand-1400-1479
  source 1..80: mol_type = other DNA
tggcttatactaaggaggtcaatgtccttgtggacattgagaacaccaacattaaggctgtcttgtattgtaatgacccg

SEQ ID NO: 20363 - DNA, 80 bp, synthetic construct
  misc_feature 1..80: note = Synthetic: >MH938449_14-cand-1560-1639
  source 1..80: mol_type = other DNA
tcagaagagtgttgtattgttgcctgagtattctggtttgactgagtttaatgtaagtgttactgcaaattggaagcatg

SEQ ID NO: 20364 - DNA, 80 bp, synthetic construct
  misc_feature 1..80: note = Synthetic: >MH938449_2-cand-90-169
  source 1..80: mol_type = other DNA
cttatgtcaacctcactacagaggagtttgaaacagtagtaccagactttattgacgtcaacaagacccttcaagatctt

SEQ ID NO: 20365 - DNA, 80 bp, synthetic construct
  misc_feature 1..80: note = Synthetic: >MH938449_3-cand-150-229
  source 1..80: mol_type = other DNA
ttaaacctactcgtgttgagcgcgaatgttgtgagttgcaggaagttgattttgtgcccccgaaagatggtggtattttg

SEQ ID NO: 20366 - DNA, 80 bp, synthetic construct
  misc_feature 1..80: note = Synthetic: >MH938449_4-cand-120-199
  source 1..80: mol_type = other DNA
gagaatttgcttatgacagtaccagcacctgatgtgtttgccaaattgcttcttagtgttaacacttcttattgggtttg

SEQ ID NO: 20367 - DNA, 80 bp, synthetic construct
  misc_feature 1..80: note = Synthetic: >MH938449_5-cand-0-79
  source 1..80: mol_type = other DNA
ctaattcaacttttgttaaggatgactactgctcaggcattgtttgtaagatctgtctttatggttaccaagaacttaag

SEQ ID NO: 20368 - DNA, 80 bp, synthetic construct
  misc_feature 1..80: note = Synthetic: >MH938449_5-cand-200-279
  source 1..80: mol_type = other DNA
atgtgttactttgtcttccagtatatcaatgttgttggcactactttaggtttgcaagattccatctgggcgcttcatct

SEQ ID NO: 20369 - DNA, 80 bp, synthetic construct
  misc_feature 1..80: note = Synthetic: >MH938449_6-cand-0-79
  source 1..80: mol_type = other DNA
acgtagttggttctttataattgtaggtttggttttgaccttgtattttagtgttggttttattaattttaccgatacag

SEQ ID NO: 20370 - DNA, 80 bp, synthetic construct
  misc_feature 1..80: note = Synthetic: >MH938449_6-cand-200-279
  source 1..80: mol_type = other DNA
aatttggttttgtgccctcacatagtgtcaagtgtcctattattgtgggtgttcttgatgacgttcgtacagtgcctgat

SEQ ID NO: 20371 - DNA, 80 bp, synthetic construct
  misc_feature 1..80: note = Synthetic: >MH938449_7-cand-90-169
  source 1..80: mol_type = other DNA
gctgtggttagtgctagtgtccttaaaaacggtagtttagatggtttttgtaagcatggtgacagttacactgcacgtat

SEQ ID NO: 20372 - DNA, 80 bp, synthetic construct
  misc_feature 1..80: note = Synthetic: >MH938449_7-cand-200-279
  source 1..80: mol_type = other DNA
aaatgttgacaagcctgatgttgtgcctaagagtatgcttattgatggtatatcttacacaacatttgtaggtgatgttg

SEQ ID NO: 20373 - DNA, 80 bp, synthetic construct
  misc_feature 1..80: note = Synthetic: >MH938449_7-cand-360-439
  source 1..80: mol_type = other DNA
agcgttagtgttacagctgttgtagttaagacaacagtgttttcgcgttttgttaaacctgttaagaaagatactgttag

SEQ ID NO: 20374 - DNA, 80 bp, synthetic construct
  misc_feature 1..80: note = Synthetic: >MH938449_8-cand-200-279
  source 1..80: mol_type = other DNA
gtaaaggatgttcaaaccattaagggtgtcaatgagaatgactttgttcttactgttacaggtgagaactatgtcattaa

SEQ ID NO: 20375 - DNA, 80 bp, synthetic construct
  misc_feature 1..80: note = Synthetic: >MH938449_8-cand-540-619
  source 1..80: mol_type = other DNA
acgtgccttatcaatttcaaactgtgactgccattacttctattagttacgtgggtgatactgtgcatgttttgcctgat

SEQ ID NO: 20376 - DNA, 80 bp, synthetic construct
  misc_feature 1..80: note = Synthetic: >MH938449_9-cand-320-399
  source 1..80: mol_type = other DNA
gttgtgttttcagattcatgcctacttctgacttcattgaacgcccttgtgaatcttgcggttttgttaagtactgtacc

SEQ ID NO: 20377 - DNA, 80 bp, synthetic construct
  misc_feature 1..80: note = Synthetic: >MH938449_9-cand-490-569
  source 1..80: mol_type = other DNA
gttggtagtacaagtagtggtcactaccgtaccaacttatatctagcaaacaaggctgttgatggttttggttttcataa

SEQ ID NO: 20378 - DNA, 80 bp, synthetic construct
  misc_feature 1..80: note = Synthetic: >MH938450_1-cand-40-119
  source 1..80: mol_type = other DNA
cttgtgacttggtttcttgttgttgggttgactggcattgtgccctcttttcttaaacttaaagtcacgtcacaactctt

SEQ ID NO: 20379 - DNA, 80 bp, synthetic construct
  misc_feature 1..80: note = Synthetic: >MH938450_10-cand-450-529
  source 1..80: mol_type = other DNA
gtgcatttagtgcgtcgtattgaacttattaacacagacagcctatacatctttgcctcagagcctgttgtaggtattac

SEQ ID NO: 20380 - DNA, 80 bp, synthetic construct
  misc_feature 1..80: note = Synthetic: >MH938450_10-cand-540-619
  source 1..80: mol_type = other DNA
gctatctactcttctcaacaacacgaacatgtcgttgaaactaattaactttggctatgccattgtgaatataagcctat

SEQ ID NO: 20381 - DNA, 80 bp, synthetic construct
  misc_feature 1..80: note = Synthetic: >MH938450_11-cand-260-339
  source 1..80: mol_type = other DNA
gtcgtagcacacctaagaggtctaagtctccacaacctgtggagaagaagaacatcagacaagtcgacaaacccacctgg

SEQ ID NO: 20382 - DNA, 80 bp, synthetic construct
  misc_feature 1..80: note = Synthetic: >MH938450_11-cand-440-519
  source 1..80: mol_type = other DNA
actacccacacttcccgcaaattgcagaacttgtaccaactcaggctgcattgctttttggaagtgaaattacagcacat

SEQ ID NO: 20383 - DNA, 80 bp, synthetic construct; identical to SEQ ID NO: 20347
  misc_feature 1..80: note = Synthetic: >MH938450_11-cand-710-789
  source 1..80: mol_type = other DNA

SEQ ID NO: 20384 - DNA, 80 bp, synthetic construct; identical to SEQ ID NO: 20348
  misc_feature 1..80: note = Synthetic: >MH938450_11-cand-1040-1119
  source 1..80: mol_type = other DNA

SEQ ID NO: 20385 - DNA, 80 bp, synthetic construct
  misc_feature 1..80: note = Synthetic: >MH938450_12-cand-0-79
  source 1..80: mol_type = other DNA
taatggaactaatctgcttgacatgctgactaaccctaagtttttccatggttatgtcaaatgtacctgtggaaacaaac

SEQ ID NO: 20386 - DNA, 80 bp, synthetic construct
  misc_feature 1..80: note = Synthetic: >MH938450_12-cand-80-159
  source 1..80: mol_type = other DNA
attggactgtaggagattggcatcatggatacaattctgtatgctgtggtgtctcttgcaatcccataagtgtggtggct

SEQ ID NO: 20387 - DNA, 80 bp, synthetic construct
  misc_feature 1..80: note = Synthetic: >MH938450_12-cand-160-239
  source 1..80: mol_type = other DNA
ggttatgtagaaccaggtgatgtcttgttgactgccacaggtgcaggaaaagggcttaaatactacaaagggctctctct

SEQ ID NO: 20388 - DNA, 80 bp, synthetic construct
  misc_feature 1..80: note = Synthetic: >MH938450_12-cand-240-319
  source 1..80: mol_type = other DNA
taagtatgtgggagatgctgaaaatgtctcagtttggcgtattatcaagacacacaacgtcgatggttttgtgtctgata

SEQ ID NO: 20389 - DNA, 80 bp, synthetic construct
  misc_feature 1..80: note = Synthetic: >MH938450_12-cand-560-639
  source 1..80: mol_type = other DNA
ggttcaaggcttttgccaaggaacgttttataagctcgagtaaactagttgattttatcaagagcattgctaatgcaact

SEQ ID NO: 20390 - DNA, 80 bp, synthetic construct
  misc_feature 1..80: note = Synthetic: >MH938450_12-cand-640-719
  source 1..80: mol_type = other DNA
tttgttgttgttggtggtgcttttgacattgttgccagtgtaccaaagcactttgcagaagcgtttgaatatttgcgtaa

SEQ ID NO: 20391 - DNA, 80 bp, synthetic construct
  misc_feature 1..80: note = Synthetic: >MH938450_12-cand-720-799
  source 1..80: mol_type = other DNA
gctgatcaaacgctgtgttgaattcttcattgaagaattcaaaattgcaggtgttgtatttaagagctttggcgactatg

SEQ ID NO: 20392 - DNA, 80 bp, synthetic construct
  misc_feature 1..80: note = Synthetic: >MH938450_12-cand-960-1039
  source 1..80: mol_type = other DNA
tgataatgtcgttccaccaagtgatggtaacgctgttattattggaggtttggcattctataccgatggtgtacactatt

SEQ ID NO: 20393 - DNA, 80 bp, synthetic construct
  misc_feature 1..80: note = Synthetic: >MH938450_12-cand-1040-1119
  source 1..80: mol_type = other DNA
ggtttatggcagactctgacactgttttggagagcccagtttttacaacaggtaaagttgactgccctaaagagtttgaa

SEQ ID NO: 20394 - DNA, 80 bp, synthetic construct
  misc_feature 1..80: note = Synthetic: >MH938450_12-cand-1110-1189
  source 1..80: mol_type = other DNA
agagtttgaacaggttgatggtggcaacatctttcacaagtttgttgcaggtgttgctgatgctgttgaattctgtcgtt

SEQ ID NO: 20395 - DNA, 80 bp, synthetic construct
  misc_feature 1..80: note = Synthetic: >MH938450_12-cand-1200-1279
  source 1..80: mol_type = other DNA
cacatttggacttgagggttttgttgtatcagctgctaagaagtttaaggctcttgccaaggcacttgcagaactctata

SEQ ID NO: 20396 - DNA, 80 bp, synthetic construct
  misc_feature 1..80: note = Synthetic: >MH938450_12-cand-1380-1459
  source 1..80: mol_type = other DNA
gtttcctgttaaagagagtaaaccaccggcgggcgttcctgttgagagctctattaaagactttatgtcttttaagaatg

SEQ ID NO: 20397 - DNA, 80 bp, synthetic construct
  misc_feature 1..80: note = Synthetic: >MH938450_12-cand-1470-1549
  source 1..80: mol_type = other DNA
tgttaaacctattcgtgttgagcgcgaatgttgtgagttgcaggaagttgattttgtaccccctaaagatggtggtattt

SEQ ID NO: 20398 - DNA, 80 bp, synthetic construct
  misc_feature 1..80: note = Synthetic: >MH938450_13-cand-80-159
  source 1..80: mol_type = other DNA
tttttaatcgcgttgttggaaaggcccgtgctgtttacatccgctacattcaaggaggttatgccatgtcatttggtgtt

SEQ ID NO: 20399 - DNA, 80 bp, synthetic construct
  misc_feature 1..80: note = Synthetic: >MH938450_13-cand-160-239
  source 1..80: mol_type = other DNA
ggtccttcttcagtccaaaattttaatggttactcactctatgttacacagaaaaatgacgtgttcgtgggcaaccgcca

SEQ ID NO: 20400 - DNA, 80 bp, synthetic construct
  misc_feature 1..80: note = Synthetic: >MH938450_13-cand-250-329
  source 1..80: mol_type = other DNA
gacatacgtatctgtaagtacaagaaaaacaaagatcctgcacaacgcccttcaggtggcttgacagacactgaaggttg

SEQ ID NO: 20401 - DNA, 80 bp, synthetic construct
  misc_feature 1..80: note = Synthetic: >MH938450_13-cand-330-409
  source 1..80: mol_type = other DNA
tctttttgcagatacaatttactttgcctttggcactggcattccacacggctatgaggtcataggtgtgtcatggactg

SEQ ID NO: 20402 - DNA, 80 bp, synthetic construct
  misc_feature 1..80: note = Synthetic: >MH938450_13-cand-420-499
  source 1..80: mol_type = other DNA
cactgttcacggaaaaactaaaatgtttcgcatctttgtacctggtgctgataagtgggactctgttagtgtaaattgtc

SEQ ID NO: 20403 - DNA, 80 bp, synthetic construct
  misc_feature 1..80: note = Synthetic: >MH938450_13-cand-500-579
  source 1..80: mol_type = other DNA
agaattcttggtcttgtgctcaacagataattactgaacctgtcaccataattgcaactactgcacctaatggaaccatt

SEQ ID NO: 20404 - DNA, 80 bp, synthetic construct
  misc_feature 1..80: note = Synthetic: >MH938450_13-cand-580-659
  source 1..80: mol_type = other DNA
gttaattacactcggtgtgctaattgcaaaggttttcctgatcatgtgttcgcagttgaagaaggtggcgaaataccagt

SEQ ID NO: 20405 - DNA, 80 bp, synthetic construct
  misc_feature 1..80: note = Synthetic: >MH938450_13-cand-670-749
  source 1..80: mol_type = other DNA
tttggcaactggttctatctttctgatggttcatcacccattggcggcaggttctactcttctcaacccctgaagcttat

SEQ ID NO: 20406 - DNA, 80 bp, synthetic construct
  misc_feature 1..80: note = Synthetic: >MH938450_13-cand-750-829
  source 1..80: mol_type = other DNA
gtgcctgtggcctgtgcctgcattggtttctaatacaggtgtcatctattttaattactcaaagcatgaccttacagggc

SEQ ID NO: 20407 - DNA, 80 bp, synthetic construct
  misc_feature 1..80: note = Synthetic: >MH938450_13-cand-830-909
  source 1..80: mol_type = other DNA
ataatggtgatttcgccaagcgctgtaacggttattttgaggaggattttgtggcaacacatttacgttttgccattaat

SEQ ID NO: 20408 - DNA, 80 bp, synthetic construct
  misc_feature 1..80: note = Synthetic: >MH938450_13-cand-1150-1229
  source 1..80: mol_type = other DNA
tcaatcactggtgctgtttatgtaaatggttacagattgttttcagttggaccagtcgaaggtgtccttttaaacctaac

SEQ ID NO: 20409 - DNA, 80 bp, synthetic construct
  misc_feature 1..80: note = Synthetic: >MH938450_13-cand-1230-1309
  source 1..80: mol_type = other DNA
tagtttaaccggttctgatttttggaccgtggcttatactaaagaggttaatgtccttgttgacatagagaacaccaaca

SEQ ID NO: 20410 - DNA, 80 bp, synthetic construct
  misc_feature 1..80: note = Synthetic: >MH938450_13-cand-1390-1469
  source 1..80: mol_type = other DNA
tactcatctgctgaagtagcccagcccattcagaagagtgttgtactgttgcctgaatattctggtttgactgagtttaa

SEQ ID NO: 20411 - DNA, 80 bp, synthetic construct
  misc_feature 1..80: note = Synthetic: >MH938450_13-cand-1470-1549
  source 1..80: mol_type = other DNA
tgtaagtgttactgcaaattggaagcaaggtaatggtgcttgtatccagtgtccaccactaaattataacataactctga

SEQ ID NO: 20412 - DNA, 80 bp, synthetic construct
  misc_feature 1..80: note = Synthetic: >MH938450_13-cand-1550-1629
  source 1..80: mol_type = other DNA
atggtgcaactgatggagctgtttgtgttgcacacaacaggttcacagttaattttcagtattatgtagattctggtttt

SEQ ID NO: 20413 - DNA, 80 bp, synthetic construct
  misc_feature 1..80: note = Synthetic: >MH938450_13-cand-1630-1709
  source 1..80: mol_type = other DNA
tacaaaattatctctggtcatggtacatgtccgttcacacttgacaagttgaataactttctcaagtttggcagtctttg

SEQ ID NO: 20414 - DNA, 80 bp, synthetic construct
  misc_feature 1..80: note = Synthetic: >MH938450_13-cand-1710-1789
  source 1..80: mol_type = other DNA
tatttctctcaaagacaatggtggttgtacaatacctttggttgctaaaaactatgtggacatcgattttccctttgcca

SEQ ID NO: 20415 - DNA, 80 bp, synthetic construct
  misc_feature 1..80: note = Synthetic: >MH938450_13-cand-1790-1869
  source 1..80: mol_type = other DNA
ccttgtatgtttcctacattgatggtggtttgatgactggcgtgccacctggttttgctaaaaatcttggtttttatgat

SEQ ID NO: 20416 - DNA, 80 bp, synthetic construct
  misc_feature 1..80: note = Synthetic: >MH938450_13-cand-1870-1949
  source 1..80: mol_type = other DNA
gccagtgttttgcacttgaatgtgtgcactgagtacaatatctatggttatgcaggtaaaggagttataacaccttccaa

SEQ ID NO: 20417 - DNA, 80 bp, synthetic construct
  misc_feature 1..80: note = Synthetic: >MH938450_13-cand-1950-2029
  source 1..80: mol_type = other DNA
ctccacttacctagctggcattagttactcagattccagtggtgctcttgttagtttcaaaaacactacaaccggcgagg

SEQ ID NO: 20418 - DNA, 80 bp, synthetic construct
  misc_feature 1..80: note = Synthetic: >MH938450_13-cand-2030-2109
  source 1..80: mol_type = other DNA
ttttcagcattaggccttgtcaaacctcacgccaatttgctgtgattaatgacaatattgtaggggtaatttcagctagc

SEQ ID NO: 20419 - DNA, 80 bp, synthetic construct
  misc_feature 1..80: note = Synthetic: >MH938450_13-cand-2110-2189
  source 1..80: mol_type = other DNA
agtgatattaacgtgagtttcaatcatacaattgagacgcccacgttctattaccatgctaacactgctcgtaattgcac

SEQ ID NO: 20420 - DNA, 80 bp, synthetic construct
  misc_feature 1..80: note = Synthetic: >MH938450_13-cand-2190-2269
  source 1..80: mol_type = other DNA
taacccagtcttgacctatgccacaattggaatttgtgctgatggtgctatgggttatgtttaccctacagctgtcaaag

SEQ ID NO: 20421 - DNA, 80 bp, synthetic construct
  misc_feature 1..80: note = Synthetic: >MH938450_13-cand-2270-2349
  source 1..80: mol_type = other DNA
caccacctgccacccctattgttactggtaatatttcaatacctgttaacttcacagtttctgttcaagctgagtatgtg

SEQ ID NO: 20422 - DNA, 80 bp, synthetic construct
  misc_feature 1..80: note = Synthetic: >MH938450_13-cand-2340-2419
  source 1..80: mol_type = other DNA
tgagtatgtgcaagtttctatcagaccagttgttgttgactgtgccacttttgtctgcaacggcaatgagcggtgtttgc

SEQ ID NO: 20423 - DNA, 80 bp, synthetic construct
  misc_feature 1..80: note = Synthetic: >MH938450_13-cand-2420-2499
  source 1..80: mol_type = other DNA
agttacttaaacagtatgtcactgcctgttcatctatagaaaatgcacttgcacttaatgctaggcttgagagtcaggac

SEQ ID NO: 20424 - DNA, 80 bp, synthetic construct
  misc_feature 1..80: note = Synthetic: >MH938450_13-cand-2500-2579
  source 1..80: mol_type = other DNA
gtcgcctcgcttcttacttatgatgaggcagcttatagacaggctttagaacttaaaacctctcaatttcagaacgactt

SEQ ID NO: 20425 - DNA, 80 bp, synthetic construct
  misc_feature 1..80: note = Synthetic: >MH938450_13-cand-2580-2659
  source 1..80: mol_type = other DNA
caacatttctgctgttttacctgcagcacaaggtaagggtagctttattgaagacttgctctttgacaaagtaattacca

SEQ ID NO: 20426 - DNA, 80 bp, synthetic construct
  misc_feature 1..80: note = Synthetic: >MH938450_2-cand-90-169
  source 1..80: mol_type = other DNA
aatctcacaacagaggagtttgaaacaatagtaccagactttattgacgtcaacaagactctccaagatcttgttgatgc

SEQ ID NO: 20427 - DNA, 80 bp, synthetic construct
  misc_feature 1..80: note = Synthetic: >MH938450_3-cand-190-269
  source 1..80: mol_type = other DNA
ccggtttgtgcatgtaaaggatgtccaaaccattaagggtgttaatgataatgattttgttcttactgttacaggtgaga

SEQ ID NO: 20428 - DNA, 80 bp, synthetic construct
  misc_feature 1..80: note = Synthetic: >MH938450_4-cand-0-79
  source 1..80: mol_type = other DNA
gtggattttcagtgtttgctaccgggttcttgaaacacaagttgctgtttttgtacacctttcttattcctactgtgaca

SEQ ID NO: 20429 - DNA, 80 bp, synthetic construct
  misc_feature 1..80: note = Synthetic: >MH938450_4-cand-50-129
  source 1..80: mol_type = other DNA
ttgtacacctttcttattcctactgtgacacttctctcattcattaatctttcttggggttattatctgagagtctttct

SEQ ID NO: 20430 - DNA, 80 bp, synthetic construct
  misc_feature 1..80: note = Synthetic: >MH938450_4-cand-170-249
  source 1..80: mol_type = other DNA
gatatgcaaggtgtagttaatgtgattgtttgttttgttgttagcagtttgcatctttatagatttagtaccagcactgt

SEQ ID NO: 20431 - DNA, 80 bp, synthetic construct; identical to SEQ ID NO: 20367
  misc_feature 1..80: note = Synthetic: >MH938450_5-cand-0-79
  source 1..80: mol_type = other DNA

SEQ ID NO: 20432 - DNA, 80 bp, synthetic construct
  misc_feature 1..80: note = Synthetic: >MH938450_5-cand-200-279
  source 1..80: mol_type = other DNA
atgtgttactttgttttccagtatatcaatgttgttggcactactttagggttgcaagattccatctgggcgcttcatct

SEQ ID NO: 20433 - DNA, 80 bp, synthetic construct
  misc_feature 1..80: note = Synthetic: >MH938450_6-cand-0-79
  source 1..80: mol_type = other DNA
acgcagttggtttttcataattgtaggtttgattttgaccttgtattttagtgttggttttattaattttaccgacacgg

SEQ ID NO: 20434 - DNA, 80 bp, synthetic construct
  misc_feature 1..80: note = Synthetic: >MH938450_6-cand-200-279
  source 1..80: mol_type = other DNA
aatttggttttttgccctcacatagtgttaagtgtcctatcattgtgggtgttctagatgacgttcgtacagtgcctgat

SEQ ID NO: 20435 - DNA, 80 bp, synthetic construct
  misc_feature 1..80: note = Synthetic: >MH938450_7-cand-90-169
  source 1..80: mol_type = other DNA
gctgtggttagtgctagtgttcttaaaaacggtagttcagatggtttttgtaagcatggtgatagttacactgcacgtat

SEQ ID NO: 20436 - DNA, 80 bp, synthetic construct
  misc_feature 1..80: note = Synthetic: >MH938450_7-cand-200-279
  source 1..80: mol_type = other DNA
aaatgttgacaagcctgatgttgtgtctaagagtatgcttatcgatggtatatcttatacaacatttgtaggtgatgttg

SEQ ID NO: 20437 - DNA, 80 bp, synthetic construct; identical to SEQ ID NO: 20373
  misc_feature 1..80: note = Synthetic: >MH938450_7-cand-360-439
  source 1..80: mol_type = other DNA

SEQ ID NO: 20438 - DNA, 80 bp, synthetic construct
  misc_feature 1..80: note = Synthetic: >MH938450_8-cand-220-299
  source 1..80: mol_type = other DNA
ctcctaattatgacaagaacttattacgtgttgttaataagttgtctaaattgaaggagaatctgcttatgacagtacca

SEQ ID NO: 20439 - DNA, 80 bp, synthetic construct
  misc_feature 1..80: note = Synthetic: >MH938450_8-cand-320-399
  source 1..80: mol_type = other DNA
attgcttctcagtgttaacacttcttattgggtttgtgatgaaactgcactagttgttactagacagtttgttaagaaag

SEQ ID NO: 20440 - DNA, 80 bp, synthetic construct
  misc_feature 1..80: note = Synthetic: >MH938450_9-cand-330-409
  source 1..80: mol_type = other DNA
aggttgtgttttcagattcatgcctacgtctgacttcattgagcatccttgtgaatcttgtggttttgttaagtattgta

SEQ ID NO: 20441 - DNA, 80 bp, synthetic construct
  misc_feature 1..80: note = Synthetic: >MH938450_9-cand-500-579
  source 1..80: mol_type = other DNA
ttgttggtagtacaagtagtggacactaccgtactaacttatatttagcaaacaaggccgttgatggttttggttttcac

SEQ ID NO: 20442 - DNA, 80 bp, synthetic construct
  misc_feature 1..80: note = Synthetic: >MK142676_1-cand-40-119
  source 1..80: mol_type = other DNA
taccacagaacgccccaaatggaatgtttttcattcattatacataccaacctgtttcttacaaacaagtagaagcagtt

SEQ ID NO: 20443 - DNA, 80 bp, synthetic construct
  misc_feature 1..80: note = Synthetic: >MK142676_2-cand-0-79
  source 1..80: mol_type = other DNA
tgaatcgttagatttttacagtcctgatgttatgagaccccctgacggtgcttatatacagaatggttattataaaccca

SEQ ID NO: 20444 - DNA, 80 bp, synthetic construct
  misc_feature 1..80: note = Synthetic: >MK142676_2-cand-80-159
  source 1..80: mol_type = other DNA
ttttttcaggttgtttcaaccaaactaatcccactgatccaaagtgcaacaatggtctttatcgaggtactcctggaaat

SEQ ID NO: 20445 - DNA, 80 bp, synthetic construct
  misc_feature 1..80: note = Synthetic: >MK142676_2-cand-160-239
  source 1..80: mol_type = other DNA
ttttctattgatggctcgtttttaggaaaatttcaggcgtttggtattatgttttggtggggtattgatactaatgttgg

SEQ ID NO: 20446 - DNA, 80 bp, synthetic construct
  misc_feature 1..80: note = Synthetic: >MK142676_2-cand-250-329
  source 1..80: mol_type = other DNA
cacgaccctacttttaatttaacagttggatcattttttgttaattcaaaaaattttactggttttccaaaggttaaaag

SEQ ID NO: 20447 - DNA, 80 bp, synthetic construct
  misc_feature 1..80: note = Synthetic: >MK142676_2-cand-330-409
  source 1..80: mol_type = other DNA
tatcatttttcttgataatggtgatgtttatgtcaatggtttgtctattggcatatataatttaaattttacacaggggc

SEQ ID NO: 20448 - DNA, 80 bp, synthetic construct
  misc_feature 1..80: note = Synthetic: >MK142676_2-cand-410-489
  source 1..80: mol_type = other DNA
taacaatttggttggctcagtgtgtaggtactatgaaagttgttacactagagaatagtaatgctctagtgcaattccag

SEQ ID NO: 20449 - DNA, 80 bp, synthetic construct
  misc_feature 1..80: note = Synthetic: >MK142676_2-cand-490-569
  source 1..80: mol_type = other DNA
gctggtaatgtggtagcgtttgaaccttgtacaggtgaaactactattaataaattacgctgtagataccagcagtttaa

SEQ ID NO: 20450 - DNA, 80 bp, synthetic construct
  misc_feature 1..80: note = Synthetic: >MK142676_2-cand-580-659
  source 1..80: mol_type = other DNA
ggtttttatgatatagacactgctacaccagtttctaataatataacttacttaccataccctgatttgcgtgataatac

SEQ ID NO: 20451 - DNA, 80 bp, synthetic construct
  misc_feature 1..80: note = Synthetic: >MK142676_2-cand-660-739
  source 1..80: mol_type = other DNA
tagtcaggctatttatgatttctatgttgcactaaaaggtcaacaagtttcttataattacacttgtgtagatcctaaat

SEQ ID NO: 20452 - DNA, 80 bp, synthetic construct
  misc_feature 1..80: note = Synthetic: >MK142676_2-cand-750-829
  source 1..80: mol_type = other DNA
taaattgaaatgtaataattcatatagttgggatcatgacaagttatgtattctaggtagtgagttatatgtgccaggtt

SEQ ID NO: 20453 - DNA, 80 bp, synthetic construct
  misc_feature 1..80: note = Synthetic: >MK142676_2-cand-830-909
  source 1..80: mol_type = other DNA
atgatgtttatacctcaactcaacatcaatatgctggcactatacctcaataccctacatgctcctcaaaaggacttagt

SEQ ID NO: 20454 - DNA, 80 bp, synthetic construct
  misc_feature 1..80: note = Synthetic: >MK142676_2-cand-920-999
  source 1..80: mol_type = other DNA
tgtacaataacataggttttactaggttttgtgcaactaaattgctagaaacacgtgatattggttctgtaaaccagtac

SEQ ID NO: 20455 - DNA, 80 bp, synthetic construct
  misc_feature 1..80: note = Synthetic: >MK142676_2-cand-1000-1079
  source 1..80: mol_type = other DNA
acttgtgtctatattgttagtgttgaaggttttgatagtaataataacggtttgcggtatcgttatattggtattgattt

SEQ ID NO: 20456 - DNA, 80 bp, synthetic construct
  misc_feature 1..80: note = Synthetic: >MK142676_2-cand-1080-1159
  source 1..80: mol_type = other DNA
tagttttggcactgctatgtatagtgttttgagtgttccactacaaatcatctacactgaacagtgccataattacaaca

SEQ ID NO: 20457 - DNA, 80 bp, synthetic construct
  misc_feature 1..80: note = Synthetic: >MK142676_2-cand-1160-1239
  source 1..80: mol_type = other DNA
tttataatatcaggggtgttggtactattattaatgctactggttttgataccaatactttacgagatggtggtttagcc

SEQ ID NO: 20458 - DNA, 80 bp, synthetic construct
  misc_feature 1..80: note = Synthetic: >MK142676_2-cand-1240-1319
  source 1..80: mol_type = other DNA
attacaagtggtagtggccttttagctttccgtaataacggcagtctttataatgtgcagccatgcgaaacagtttcaac

SEQ ID NO: 20459 - DNA, 80 bp, synthetic construct
  misc_feature 1..80: note = Synthetic: >MK142676_2-cand-1320-1399
  source 1..80: mol_type = other DNA
gcaggctgtagttgttaatggttctgtagtaggattatttgtccctgtgtcgtgtagtctagcttcagaacttaatttgg

SEQ ID NO: 20460 - DNA, 80 bp, synthetic construct
  misc_feature 1..80: note = Synthetic: >MK142676_2-cand-1400-1479
  source 1..80: mol_type = other DNA
ggaaccacacagaatatgttgatggtggttgcctaattactaataaaactactaggcgtacgcgtaggagtattgacatt

SEQ ID NO: 20461 - DNA, 80 bp, synthetic construct
  misc_feature 1..80: note = Synthetic: >MK142676_2-cand-1480-1559
  source 1..80: mol_type = other DNA
tatacaggagattgctcgggtctttttgcctccatgggtttctcatgtatttatggtaatggtacagtttttaatagaac

SEQ ID NO: 20462 - DNA, 80 bp, synthetic construct
  misc_feature 1..80: note = Synthetic: >MK142676_2-cand-1560-1639
  source 1..80: mol_type = other DNA
attgccaaaacctgcggctcagactaatataaaaccgttattaggtgttgttgctaatgtttctattcctacagagttga

SEQ ID NO: 20463 - DNA, 80 bp, synthetic construct
  misc_feature 1..80: note = Synthetic: >MK142676_2-cand-1640-1719
  source 1..80: mol_type = other DNA
cactagctgttactactgaatatttgcagacgtcttatcagaaagttactattgactgtgctaagtacgtttgcggagat

SEQ ID NO: 20464 - DNA, 80 bp, synthetic construct
  misc_feature 1..80: note = Synthetic: >MK142676_2-cand-1710-1789
  source 1..80: mol_type = other DNA
ttgcggagattctcttaggtgccgtactcttctacaacagtacggtactttttgccaaagtgttaatggtatattaagtg

SEQ ID NO: 20465 - DNA, 80 bp, synthetic construct
  misc_feature 1..80: note = Synthetic: >MK211369_1-cand-50-129
  source 1..80: mol_type = other DNA
gacacacttgttaacgccattggttgtatttttactagtacttgtgacactcttattgttgcaggcaaggcatttgcgag

SEQ ID NO: 20466 - DNA, 80 bp, synthetic construct; identical to SEQ ID NO: 20465
  misc_feature 1..80: note = Synthetic: >MK211370_1-cand-50-129
  source 1..80: mol_type = other DNA

SEQ ID NO: 20467 - DNA, 80 bp, synthetic construct
  misc_feature 1..80: note = Synthetic: >MK211372_1-cand-130-209
  source 1..80: mol_type = other DNA
ctagtctatgggcagactcatcttttgggtgtcctctacgttgaacataaaccaggtgacactattactggtatgcccaa

SEQ ID NO: 20468 - DNA, 80 bp, synthetic construct
  misc_feature 1..80: note = Synthetic: >MK211372_1-cand-190-269
  source 1..80: mol_type = other DNA
actattactggtatgcccaagtcggctgagggggtcaatgacatctcttttgtgcaccttaacgtgtgtacttcctacac

SEQ ID NO: 20469 - DNA, 80 bp, synthetic construct; identical to SEQ ID NO: 20465
  misc_feature 1..80: note = Synthetic: >MK211372_2-cand-50-129
  source 1..80: mol_type = other DNA

SEQ ID NO: 20470 - DNA, 80 bp, synthetic construct; identical to SEQ ID NO: 20145
  misc_feature 1..80: note = Synthetic: >MK211372_3-cand-0-79
  source 1..80: mol_type = other DNA

SEQ ID NO: 20471 - DNA, 80 bp, synthetic construct; identical to SEQ ID NO: 20146
  misc_feature 1..80: note = Synthetic: >MK211372_3-cand-100-179
  source 1..80: mol_type = other DNA

SEQ ID NO: 20472 - DNA, 80 bp, synthetic construct; identical to SEQ ID NO: 19941
  misc_feature 1..80: note = Synthetic: >MK211373_1-cand-40-119
  source 1..80: mol_type = other DNA

SEQ ID NO: 20473 - DNA, 80 bp, synthetic construct
  misc_feature 1..80: note = Synthetic: >MK211373_10-cand-90-169
  source 1..80: mol_type = other DNA
tttgctctattttcagtgctattttgatgctgctgtagttcttcttacgctcttgtctcgcttagcatatcttgcttatt

SEQ ID NO: 20474 - DNA, 80 bp, synthetic construct
  misc_feature 1..80: note = Synthetic: >MK211373_10-cand-290-369
  source 1..80: mol_type = other DNA
attatgtgcggcttgggaaccaaatggtaccttttgttgttgctaaagatttgtatgttgcactacgtggccgtaaagat

SEQ ID NO: 20475 - DNA, 80 bp, synthetic construct; identical to SEQ ID NO: 19949
  misc_feature 1..80: note = Synthetic: >MK211373_10-cand-390-469
  source 1..80: mol_type = other DNA

SEQ ID NO: 20476 - DNA, 80 bp, synthetic construct
  misc_feature 1..80: note = Synthetic: >MK211373_11-cand-0-79
  source 1..80: mol_type = other DNA
cacgtcatgtacggaaccggtgcttacgtatggtagtgtaggtgtttgtcctgatggcacattaatcatgattcaaacac

SEQ ID NO: 20477 - DNA, 80 bp, synthetic construct
  misc_feature 1..80: note = Synthetic: >MK211373_11-cand-100-179
  source 1..80: mol_type = other DNA
gtgtcacctattgtcagtggcaacattacaatcccactgaatttcacagtctctgtgcaagttgaataccttcagatgta

SEQ ID NO: 20478 - DNA, 80 bp, synthetic construct
  misc_feature 1..80: note = Synthetic: >MK211373_11-cand-200-279
  source 1..80: mol_type = other DNA
actgtaacatgtatgtctgtggtggcaaccctcattgtttgcgccttatgtcgcagtatgcttctgcctgtcgtactata

SEQ ID NO: 20479 - DNA, 80 bp, synthetic construct
  misc_feature 1..80: note = Synthetic: >MK211373_11-cand-300-379
  source 1..80: mol_type = other DNA
tgcacgtttagagtcagctgaggttgcgaacacaatctctgtttcgccgcaggctgttgagctcgctaatataaccaatt

SEQ ID NO: 20480 - DNA, 80 bp, synthetic construct
  misc_feature 1..80: note = Synthetic: >MK211373_11-cand-390-469
  source 1..80: mol_type = other DNA
taatatgtctgttctactaccaagagctaatggcaggagctttatcgaagacttgctatttgacaaggtagtcactagtg

SEQ ID NO: 20481 - DNA, 80 bp, synthetic construct
  misc_feature 1..80: note = Synthetic: >MK211373_11-cand-690-769
  source 1..80: mol_type = other DNA
gtcacgtttaaactacgtggcactgcaaactgatgtgcttaaccgtaaccaggaaatattggcacagtcctttaatagtg

SEQ ID NO: 20482 - DNA, 80 bp, synthetic construct
  misc_feature 1..80: note = Synthetic: >MK211373_12-cand-0-79
  source 1..80: mol_type = other DNA
aattttggtctcccaccaaattcatcagctgtcgttagtggttacttacctaaacctacgggttggcagtgcgctaatct

SEQ ID NO: 20483 - DNA, 80 bp, synthetic construct
  misc_feature 1..80: note = Synthetic: >MK211373_12-cand-80-159
  source 1..80: mol_type = other DNA
accggatgttggattttacacttggcttaatggggtttttattacacgctttaacagcacccgcgagtttgccattagtg

SEQ ID NO: 20484 - DNA, 80 bp, synthetic construct
  misc_feature 1..80: note = Synthetic: >MK211373_12-cand-160-239
  source 1..80: mol_type = other DNA
taagcgagggtggtcacccagtctctgcttatcagtattacaatctgtatgcctctttgcgcaatggtattttcacattg

SEQ ID NO: 20485 - DNA, 80 bp, synthetic construct
  misc_feature 1..80: note = Synthetic: >MK211373_12-cand-240-319
  source 1..80: mol_type = other DNA
aggatttgcaagtggcctaatggtggtaatggaccagattatgactctactacttctaatggcgttgcttgtgtagtaga

SEQ ID NO: 20486 - DNA, 80 bp, synthetic construct
  misc_feature 1..80: note = Synthetic: >MK211373_12-cand-320-399
  source 1..80: mol_type = other DNA
caccacctttagttttgcatttgaatttggtggtgttgttggtgtttcttgggactcacattatgttatgctatttactc

SEQ ID NO: 20487 - DNA, 80 bp, synthetic construct
  misc_feature 1..80: note = Synthetic: >MK211373_12-cand-400-479
  source 1..80: mol_type = other DNA
cattaggtgttaggcgcatttatgctccaaacacttggaatagagtgcatgtgcgctgtccagactttcatggttgtacc

SEQ ID NO: 20488 - DNA, 80 bp, synthetic construct
  misc_feature 1..80: note = Synthetic: >MK211373_12-cand-480-559
  source 1..80: mol_type = other DNA
acttatattgctaaagagttagttactgcttatgttgagacgggagccgatggcatcgttaccaattatacggtttgcac

SEQ ID NO: 20489 - DNA, 80 bp, synthetic construct
  misc_feature 1..80: note = Synthetic: >MK211373_12-cand-560-639
  source 1..80: mol_type = other DNA
ttcttgcaatggtttcccacagcacatttttgctgttgtggaaggtggttacattccacgtgaatttggtctagacaatt

SEQ ID NO: 20490 - DNA, 80 bp, synthetic construct
  misc_feature 1..80: note = Synthetic: >MK211373_12-cand-640-719
  source 1..80: mol_type = other DNA
ggtatgtcctttctaacacttctacggtgctagatggtcgtgttgtaaccaaccaacccttacgcgtctactgtttatgg

SEQ ID NO: 20491 - DNA, 80 bp, synthetic construct
  misc_feature 1..80: note = Synthetic: >MK211373_12-cand-720-799
  source 1..80: mol_type = other DNA
cctgtgcctgtgctaactgctacggacaagcccatatatttcaatatgtcgcgtaatagtggtgttaggtgtaatggtta

SEQ ID NO: 20492 - DNA, 80 bp, synthetic construct
  misc_feature 1..80: note = Synthetic: >MK211373_12-cand-800-879
  source 1..80: mol_type = other DNA
tagctaccagcgtgatgtgtctcacctgcgatttggacttaacttcaccaaccaacaggtgcttaatggtgtgcacaata

SEQ ID NO: 20493 - DNA, 80 bp, synthetic construct
  misc_feature 1..80: note = Synthetic: >MK211373_12-cand-880-959
  source 1..80: mol_type = other DNA
ttgacttgctaggtgacacatttaattttacattcacttgcactaataacagtgatattacaaagggcgagcggcttgtg

SEQ ID NO: 20494 - DNA, 80 bp, synthetic construct
  misc_feature 1..80: note = Synthetic: >MK211373_12-cand-960-1039
  source 1..80: mol_type = other DNA
ccatttgggttcctggacactgtgtatcgatgctttgtcttttttgatgttggcaatggtacagtcaacaaatttgtggg

SEQ ID NO: 20495 - DNA, 80 bp, synthetic construct
  misc_feature 1..80: note = Synthetic: >MK211373_12-cand-1040-1119
  source 1..80: mol_type = other DNA
tattttaccaccagttgtcagagagattgttatttctaagtttggcactgtgtatataaatggtgttaatatggctacac

SEQ ID NO: 20496 - DNA, 80 bp, synthetic construct
  misc_feature 1..80: note = Synthetic: >MK211373_12-cand-1120-1199
  source 1..80: mol_type = other DNA
taccacctatagagagtgttgtctttaacgtcactagcacagttggttcagacttttggactgtgggctttactgagatg

SEQ ID NO: 20497 - DNA, 80 bp, synthetic construct
  misc_feature 1..80: note = Synthetic: >MK211373_12-cand-1200-1279
  source 1..80: mol_type = other DNA
gctgatgtcatggttgatattaatgccactcgtatagtagatattttgtactgtgacacacccattaataagttaaagtg

SEQ ID NO: 20498 - DNA, 80 bp, synthetic construct
  misc_feature 1..80: note = Synthetic: >MK211373_12-cand-1280-1359
  source 1..80: mol_type = other DNA
tcaacagcttacctattctctcgatgatgggttctataccacgactagcatttacacacaagccgtaccacgcacttatg

SEQ ID NO: 20499 - DNA, 80 bp, synthetic construct
  misc_feature 1..80: note = Synthetic: >MK211373_12-cand-1360-1439
  source 1..80: mol_type = other DNA
tagcgttgccttaccacgcaacccatagtcccattaatattacagctcaggttagtgttaacagtagagaggaccagttc

SEQ ID NO: 20500 - DNA, 80 bp, synthetic construct
  misc_feature 1..80: note = Synthetic: >MK211373_12-cand-1440-1519
  source 1..80: mol_type = other DNA
cttatcaatggacttaacggcacctactgtgttaacacgactcagtttactgttgaaacttatttcacgcagtacactgg

SEQ ID NO: 20501 - DNA, 80 bp, synthetic construct
  misc_feature 1..80: note = Synthetic: >MK211373_12-cand-1520-1599
  source 1..80: mol_type = other DNA
tatgcgtgttgctgtagagaacttggactgcccattcagtttggagaatttaaataatttcctgtctttcggctctattt

SEQ ID NO: 20502 - DNA, 80 bp, synthetic construct
  misc_feature 1..80: note = Synthetic: >MK211373_12-cand-1600-1679
  source 1..80: mol_type = other DNA
gtttctctacgtatgatgtgggtggtggttgcagaatgcgattagacaagatttttatttccacacccacaccgtggaga

SEQ ID NO: 20503 - DNA, 80 bp, synthetic construct; identical to SEQ ID NO: 19965
  misc_feature 1..80: note = Synthetic: >MK211373_2-cand-30-109
  source 1..80: mol_type = other DNA

SEQ ID NO: 20504 - DNA, 80 bp, synthetic construct
  misc_feature 1..80: note = Synthetic: >MK211373_3-cand-30-109
  source 1..80: mol_type = other DNA
gcttacggcagtgttgctgtaccatgtaatgtagtctttcagatgcgcatctcttgcccacttggtaattatacctatca

SEQ ID NO: 20505 - DNA, 80 bp, synthetic construct; identical to SEQ ID NO: 19967
  misc_feature 1..80: note = Synthetic: >MK211373_4-cand-0-79
  source 1..80: mol_type = other DNA

SEQ ID NO: 20506 - DNA, 80 bp, synthetic construct; identical to SEQ ID NO: 19968
  misc_feature 1..80: note = Synthetic: >MK211373_6-cand-270-349
  source 1..80: mol_type = other DNA

SEQ ID NO: 20507 - DNA, 80 bp, synthetic construct; identical to SEQ ID NO: 19969
  misc_feature 1..80: note = Synthetic: >MK211373_7-cand-0-79
  source 1..80: mol_type = other DNA

SEQ ID NO: 20508 - DNA, 80 bp, synthetic construct; identical to SEQ ID NO: 19970
  misc_feature 1..80: note = Synthetic: >MK211373_7-cand-120-199
  source 1..80: mol_type = other DNA

SEQ ID NO: 20509 - DNA, 80 bp, synthetic construct
  misc_feature 1..80: note = Synthetic: >MK211373_7-cand-170-249
  source 1..80: mol_type = other DNA
ctcaactaaacgactttattactacctgccactgtcactaattccaccggcgtggtttactgtactactcatacactatg

SEQ ID NO: 20510 - DNA, 80 bp, synthetic construct; identical to SEQ ID NO: 19972
  misc_feature 1..80: note = Synthetic: >MK211373_7-cand-290-369
  source 1..80: mol_type = other DNA

SEQ ID NO: 20511 - DNA, 80 bp, synthetic construct; identical to SEQ ID NO: 19973
  misc_feature 1..80: note = Synthetic: >MK211373_8-cand-150-229
  source 1..80: mol_type = other DNA

SEQ ID NO: 20512 - DNA, 80 bp, synthetic construct; identical to SEQ ID NO: 19974
  misc_feature 1..80: note = Synthetic: >MK211373_8-cand-270-349
  source 1..80: mol_type = other DNA

SEQ ID NO: 20513 - DNA, 80 bp, synthetic construct; identical to SEQ ID NO: 19975
  misc_feature 1..80: note = Synthetic: >MK211373_8-cand-390-469
  source 1..80: mol_type = other DNA

SEQ ID NO: 20514 - DNA, 80 bp, synthetic construct; identical to SEQ ID NO: 19942
  misc_feature 1..80: note = Synthetic: >MK211373_9-cand-0-79
  source 1..80: mol_type = other DNA

SEQ ID NO: 20515 - DNA, 80 bp, synthetic construct; identical to SEQ ID NO: 19943
  misc_feature 1..80: note = Synthetic: >MK211373_9-cand-270-349
  source 1..80: mol_type = other DNA

SEQ ID NO: 20516 - DNA, 80 bp, synthetic construct; identical to SEQ ID NO: 19944
  misc_feature 1..80: note = Synthetic: >MK211373_9-cand-360-439
  source 1..80: mol_type = other DNA

SEQ ID NO: 20517 - DNA, 80 bp, synthetic construct; identical to SEQ ID NO: 19945
  misc_feature 1..80: note = Synthetic: >MK211373_9-cand-450-529
  source 1..80: mol_type = other DNA

SEQ ID NO: 20518 - DNA, 80 bp, synthetic construct; identical to SEQ ID NO: 19946
  misc_feature 1..80: note = Synthetic: >MK211373_9-cand-500-579
  source 1..80: mol_type = other DNA

SEQ ID NO: 20519 - DNA, 80 bp, synthetic construct
  misc_feature 1..80: note = Synthetic: >MK211374_1-cand-130-209
  source 1..80: mol_type = other DNA
ccgtggctggatttttggttcgacttttgacaataggtctcaatctgctattatagtaaataactctacacacattcttg

SEQ ID NO: 20520 - DNA, 80 bp, synthetic construct
  misc_feature 1..80: note = Synthetic: >MK211374_1-cand-220-299
  source 1..80: mol_type = other DNA
taactttattatttgtaaggagcctatgtttactgtgtctcaaaatagacactttaagtcttgggtttatcaggatgcta

SEQ ID NO: 20521 - DNA, 80 bp, synthetic construct
  misc_feature 1..80: note = Synthetic: >MK211374_1-cand-310-389
  source 1..80: mol_type = other DNA
gtatgatgtagcatatcctagctttcagttggatgtctctctcaataacaatgttaatttcaaacatttgcgagagttcg

SEQ ID NO: 20522 - DNA, 80 bp, synthetic construct
  misc_feature 1..80: note = Synthetic: >MK211374_1-cand-400-479
  source 1..80: mol_type = other DNA
cgttgatggcttcttgaaggtttattcttcttatgaaccgatcaacgttctcaatggcatacctagtggtttttccgtac

SEQ ID NO: 20523 - DNA, 80 bp, synthetic construct
  misc_feature 1..80: note = Synthetic: >MK211374_1-cand-490-569
  source 1..80: mol_type = other DNA
aatgagtttaccattaggtatcaacattacgggagttcgtgttgttatgactatgtttagtagtacacagcagaacttcc

SEQ ID NO: 20524 - DNA, 80 bp, synthetic construct
  misc_feature 1..80: note = Synthetic: >MK211374_1-cand-580-659
  source 1..80: mol_type = other DNA
tgccgcttattatattggttatctcaaaccaagaacttttatgttacaattcaacactaatggcactattgtcaatgctg

SEQ ID NO: 20525 - DNA, 80 bp, synthetic construct; identical to SEQ ID NO: 19678
  misc_feature 1..80: note = Synthetic: >MK211375_1-cand-0-79
  source 1..80: mol_type = other DNA

SEQ ID NO: 20526 - DNA, 80 bp, synthetic construct; identical to SEQ ID NO: 19678
  misc_feature 1..80: note = Synthetic: >MK211377_1-cand-0-79
  source 1..80: mol_type = other DNA

SEQ ID NO: 20527 - DNA, 80 bp, synthetic construct
  misc_feature 1..80: note = Synthetic: >MK211379_10-cand-90-169
  source 1..80: mol_type = other DNA
atttttagctatacttccttacactactgcgtttacattgattgtgcgcacccagtccctatgtgtcgagtctgaaaact

SEQ ID NO: 20528 - DNA, 80 bp, synthetic construct
  misc_feature 1..80: note = Synthetic: >MK211379_10-cand-270-349
  source 1..80: mol_type = other DNA
ggtgttggatcaagatatcggcattgtcaacgtgttcacactcgttgacccctttggcacttttatgtgtaagcatagca

SEQ ID NO: 20529 - DNA, 80 bp, synthetic construct
  misc_feature 1..80: note = Synthetic: >MK211379_10-cand-330-409
  source 1..80: mol_type = other DNA
ttttatgtgtaagcatagcattgccaaaggtgtattgccgcatactacttggggtgttaggctaatcagtctatcagtct

SEQ ID NO: 20530 - DNA, 80 bp, synthetic construct
  misc_feature 1..80: note = Synthetic: >MK211379_10-cand-600-679
  source 1..80: mol_type = other DNA
cgccatgtcccaattaccaattacttatgcacctagcaaaagaggccgttacacaatccctattaaggatgaattttagg

SEQ ID NO: 20531 - DNA, 80 bp, synthetic construct
  misc_feature 1..80: note = Synthetic: >MK211379_10-cand-960-1039
  source 1..80: mol_type = other DNA
tgtttccaaaataaatatgtatctggttgtgtgggcttagagaatcgttgcaaacatggagaagtgcacacccaacaatt

SEQ ID NO: 20532 - DNA, 80 bp, synthetic construct
  misc_feature 1..80: note = Synthetic: >MK211379_11-cand-0-79
  source 1..80: mol_type = other DNA
agttattagtcttaatccagcttcaggtagtcatttggtatgccctaccaacaatgacacagatgttgtagaaaaccagt

SEQ ID NO: 20533 - DNA, 80 bp, synthetic construct
  misc_feature 1..80: note = Synthetic: >MK211379_11-cand-90-169
  source 1..80: mol_type = other DNA
caatttttacggttattctggtaatggtgttttgactaagtctaatctcaccataccagataataaattgtttgttgcta

SEQ ID NO: 20534 - DNA, 80 bp, synthetic construct
  misc_feature 1..80: note = Synthetic: >MK211379_11-cand-180-259
  source 1..80: mol_type = other DNA
tagtattatagcagttaaagcacagggtactgtctacagcatttcaccatgcgtttctgtacctgtatcagtagggtatg

SEQ ID NO: 20535 - DNA, 80 bp, synthetic construct
  misc_feature 1..80: note = Synthetic: >MK211379_11-cand-230-309
  source 1..80: mol_type = other DNA
gcgtttctgtacctgtatcagtagggtatgatcctaattatgaacaagcgctattgtttaatggacttgaatgtaatcaa

SEQ ID NO: 20536 - DNA, 80 bp, synthetic construct
  misc_feature 1..80: note = Synthetic: >MK211379_11-cand-500-579
  source 1..80: mol_type = other DNA
aaattttttccgtaagtgatgacacttctaagtcgtatttgagtttagttaattacgaccctacttacgacagcactact

SEQ ID NO: 20537 - DNA, 80 bp, synthetic construct
  misc_feature 1..80: note = Synthetic: >MK211379_11-cand-590-669
  source 1..80: mol_type = other DNA
cacctgtttattgggttagcataccaactaatttcacactagctgcaggtactgaatatattcagactacctcaccaaag

SEQ ID NO: 20538 - DNA, 80 bp, synthetic construct
  misc_feature 1..80: note = Synthetic: >MK211379_11-cand-680-759
  source 1..80: mol_type = other DNA
actgtgctaaatatctttgtggtgattcagataagtgtctcacagttctattacaatatggaactttttgtgacgacgtg

SEQ ID NO: 20539 - DNA, 80 bp, synthetic construct
  misc_feature 1..80: note = Synthetic: >MK211379_11-cand-770-849
  source 1..80: mol_type = other DNA
tagctgaggttagctcagttattgattctactatggtttcgctagtctctgagttgacagctgatgttgtgcgtagtgaa

SEQ ID NO: 20540 - DNA, 80 bp, synthetic construct
  misc_feature 1..80: note = Synthetic: >MK211379_11-cand-860-939
  source 1..80: mol_type = other DNA
ttgacactacctataatttcacttctttgatgggatgtcttggttcatcttgcaatactagaaattatcgatctgcactt

SEQ ID NO: 20541 - DNA, 80 bp, synthetic construct
  misc_feature 1..80: note = Synthetic: >MK211379_2-cand-40-119
  source 1..80: mol_type = other DNA
tttctcgtgaacagagttataaagcacaagttggtactgtttttgttgatggcctagattattctaactgcaaacctaag

SEQ ID NO: 20542 - DNA, 80 bp, synthetic construct
  misc_feature 1..80: note = Synthetic: >MK211379_3-cand-40-119
  source 1..80: mol_type = other DNA
taccttttatggttctgtagtgttagatgatttgtataaacccgttagcataatctgtccttgtggcagacctgctataa

SEQ ID NO: 20543 - DNA, 80 bp, synthetic construct
  misc_feature 1..80: note = Synthetic: >MK211379_4-cand-0-79
  source 1..80: mol_type = other DNA
acatggatggtggtctccacctttgttggagtctaccaatcattgtggcccggcctgagttacttcttaaagtagctcgt

SEQ ID NO: 20544 - DNA, 80 bp, synthetic construct
  misc_feature 1..80: note = Synthetic: >MK211379_4-cand-80-159
  source 1..80: mol_type = other DNA
gggttacctgtaacctctactaacgtctttgcatttttctgtttatgctacgcgctgttatgcacaaaactaactcgtgt

SEQ ID NO: 20545 - DNA, 80 bp, synthetic construct
  misc_feature 1..80: note = Synthetic: >MK211379_5-cand-110-189
  source 1..80: mol_type = other DNA
ttgtatggcttaaaatccacactggtgcttaagggagttacttatgtacctggtgttaaaggagatttgctttgtttgaa

SEQ ID NO: 20546 - DNA, 80 bp, synthetic construct
  misc_feature 1..80: note = Synthetic: >MK211379_6-cand-280-359
  source 1..80: mol_type = other DNA
caaagaagaagagaaaattgcgcagttttctgtaaaaatgtatgccgctctatcttcagttgttaaaatagcctatgaca

SEQ ID NO: 20547 - DNA, 80 bp, synthetic construct
  misc_feature 1..80: note = Synthetic: >MK211379_7-cand-0-79
  source 1..80: mol_type = other DNA
tggattattgacagaaactcaagtttgtgccaaatctcttggtgtattgttaacacctaagcaacagaaaatggaagtag

SEQ ID NO: 20548 - DNA, 80 bp, synthetic construct
  misc_feature 1..80: note = Synthetic: >MK211379_7-cand-110-189
  source 1..80: mol_type = other DNA
ttgatctaaccactggtgagttggaagatgccagtggtacccttgaagaggtcttcggatcctcagacttagcacttgta

SEQ ID NO: 20549 - DNA, 80 bp, synthetic construct
  misc_feature 1..80: note = Synthetic: >MK211379_7-cand-210-289
  source 1..80: mol_type = other DNA
ggctagtaaggtatttgtgcgtactgaagatggtatcctctatcgctatgtccgtgaaggaggcgtattgcttaaacctt

SEQ ID NO: 20550 - DNA, 80 bp, synthetic construct
  misc_feature 1..80: note = Synthetic: >MK211379_8-cand-0-79
  source 1..80: mol_type = other DNA
ctaatggttatgtaaaattagcagaccatgtgttcttgaagtgtgctgatattgttcaagaggcaaaggagtacacttat

SEQ ID NO: 20551 - DNA, 80 bp, synthetic construct
  misc_feature 1..80: note = Synthetic: >MK211379_8-cand-180-259
  source 1..80: mol_type = other DNA
cagcttttattaagcagaatggccctttaaagcctggtgatcatgttttgttgaactctcatggcttggctaaagatgga

SEQ ID NO: 20552 - DNA, 80 bp, synthetic construct
  misc_feature 1..80: note = Synthetic: >MK211379_8-cand-480-559
  source 1..80: mol_type = other DNA
gtaatgtggattttactgtgccaggaccaccttctggtgtacaatatgtacctgctattgattgggcagaagctgtagat

SEQ ID NO: 20553 - DNA, 80 bp, synthetic construct
  misc_feature 1..80: note = Synthetic: >MK211379_8-cand-570-649
  source 1..80: mol_type = other DNA
ctagtcttaacatacccgtagaagatgttgagaatgaggtagctgcatgtgttaaagacaatgttaagagctgttgttac

SEQ ID NO: 20554 - DNA, 80 bp, synthetic construct
  misc_feature 1..80: note = Synthetic: >MK211379_8-cand-660-739
  source 1..80: mol_type = other DNA
aaagatttaaaattaaacttgtacctgtgccatgtggtgcagctgcgaaaattgaattccacaacatacaaatagcacca

SEQ ID NO: 20555 - DNA, 80 bp, synthetic construct
  misc_feature 1..80: note = Synthetic: >MK211379_9-cand-0-79
  source 1..80: mol_type = other DNA
gttttgagtaaagtttcgtgtgttttgctaccagatccttttatagcttattctggccaaacattaaagcagagtattta

SEQ ID NO: 20556 - DNA, 80 bp, synthetic construct
  misc_feature 1..80: note = Synthetic: >MK211379_9-cand-90-169
  source 1..80: mol_type = other DNA
accactaatgttactgtgtatccagttacaccgtctgcgaatggaggtagttcagccactatctataacactacagaagt

SEQ ID NO: 20557 - DNA, 80 bp, synthetic construct
  misc_feature 1..80: note = Synthetic: >MK211379_9-cand-180-259
  source 1..80: mol_type = other DNA
aatggtttgtttgttcatacttatatgtacagagaacaatctcctagtacatattgccaagaaccatttggtgtggtttt

SEQ ID NO: 20558 - DNA, 80 bp, synthetic construct
  misc_feature 1..80: note = Synthetic: >MK211379_9-cand-360-439
  source 1..80: mol_type = other DNA
tatatcatagtgtgtagcaatgctacaatatgtgcataccctgcttttaatagatggggtcctgcaggtgcattttatgc

SEQ ID NO: 20559 - DNA, 80 bp, synthetic construct
  misc_feature 1..80: note = Synthetic: >MK211379_9-cand-450-529
  source 1..80: mol_type = other DNA
tttgtcaaccacggtgactcctgctttgttaataatacctttgaaatcccacttaatacatcccgtattaatttggcttt

SEQ ID NO: 20560 - DNA, 80 bp, synthetic construct
  misc_feature 1..80: note = Synthetic: >MK211379_9-cand-540-619
  source 1..80: mol_type = other DNA
gatggcaatttgttgctctatcattctaaatggctacctacctcgggattaaaccatggttttagaggatactccattac

SEQ ID NO: 20561 - DNA, 80 bp, synthetic construct
  misc_feature 1..80: note = Synthetic: >MK211379_9-cand-630-709
  source 1..80: mol_type = other DNA
agtgtaggtgtaggagctaatttacctaaggcacaatttttccaatcattatctagacacctagctgcaggtggtgatgg

SEQ ID NO: 20562 - DNA, 80 bp, synthetic construct
  misc_feature 1..80: note = Synthetic: >MK211379_9-cand-810-889
  source 1..80: mol_type = other DNA
gattgttcactaaatgcaggtgaagagcttttttgtgtaacaggcacgtttcacccgcctactggtgtatatccacttag

SEQ ID NO: 20563 - DNA, 80 bp, synthetic construct; identical to SEQ ID NO: 18466
  misc_feature 1..80: note = Synthetic: >MK217372_1-cand-0-79
  source 1..80: mol_type = other DNA

SEQ ID NO: 20564 - DNA, 80 bp, synthetic construct
  misc_feature 1..80: note = Synthetic: >MK217372_2-cand-0-79
  source 1..80: mol_type = other DNA
tgacattattttatgtgatgacagtccccgtggtaggttagcttgtcagtataatacaggcaatttttctgacggtttgt

SEQ ID NO: 20565 - DNA, 80 bp, synthetic construct
  misc_feature 1..80: note = Synthetic: >MK217372_2-cand-90-169
  source 1..80: mol_type = other DNA
cgtaagcagtgaagttaatgaaacttttatagtttttgaaaagaatacagaaactactatgcttacattaaataatttca

SEQ ID NO: 20566 - DNA, 80 bp, synthetic construct; identical to SEQ ID NO: 20564
  misc_feature 1..80: note = Synthetic: >MK217375_2-cand-0-79
  source 1..80: mol_type = other DNA

SEQ ID NO: 20567 - DNA, 80 bp, synthetic construct; identical to SEQ ID NO: 20565
  misc_feature 1..80: note = Synthetic: >MK217375_2-cand-90-169
  source 1..80: mol_type = other DNA

SEQ ID NO: 20568 - DNA, 80 bp, synthetic construct
  misc_feature 1..80: note = Synthetic: >MK472067_1-cand-40-119
  source 1..80: mol_type = other DNA
gaaaaaccgctggtgccagattttggtttcaatttgccttcagctgtggaggttgttgaaccaaccactccagttcagtc

SEQ ID NO: 20569 - DNA, 80 bp, synthetic construct
  misc_feature 1..80: note = Synthetic: >MK472067_10-cand-10-89
  source 1..80: mol_type = other DNA
tgaattagaagaggttgattatgctgaacccggcacagaaggtgttttgaccatagttgatggccacgcgttttatcatg

SEQ ID NO: 20570 - DNA, 80 bp, synthetic construct
  misc_feature 1..80: note = Synthetic: >MK472067_10-cand-120-199
  source 1..80: mol_type = other DNA
ctgctgtagcccctgtttgttttaaaaagcgtggcgggggttctgttagtttcgcagagaaacttgatgtcaagattata

SEQ ID NO: 20571 - DNA, 80 bp, synthetic construct
  misc_feature 1..80: note = Synthetic: >MK472067_10-cand-350-429
  source 1..80: mol_type = other DNA
gagcatattgaagtgccacaatattatgtttatgatcaagagggcggtacggatattaccttacctgttatggtctcaga

SEQ ID NO: 20572 - DNA, 80 bp, synthetic construct
  misc_feature 1..80: note = Synthetic: >MK472067_10-cand-460-539
  source 1..80: mol_type = other DNA
acagtgtgctattgaatttgaagaaaaccagcaagaattgagtgtggaagatgcacttaatgctctggattctgctatag

SEQ ID NO: 20573 - DNA, 80 bp, synthetic construct
  misc_feature 1..80: note = Synthetic: >MK472067_11-cand-0-79
  source 1..80: mol_type = other DNA
gtatgaatggtttgaattacgcgtccgataaatttttctcttttggagatttcgtttctcgtaatttaattgtcattcta

SEQ ID NO: 20574 - DNA, 80 bp, synthetic construct
  misc_feature 1..80: note = Synthetic: >MK472067_11-cand-250-329
  source 1..80: mol_type = other DNA
ggttgccaaagtttgtcttactttgtatgctttatatgccttgttgtttatgataatacggttttcaccttttggtgggc

SEQ ID NO: 20575 - DNA, 80 bp, synthetic construct
  misc_feature 1..80: note = Synthetic: >MK472067_11-cand-350-429
  source 1..80: mol_type = other DNA
caaggttatgctaattccagttttgataaaaatgactactgtgatagtgttgtttgtaaaatctgtctgtttggttacca

SEQ ID NO: 20576 - DNA, 80 bp, synthetic construct
  misc_feature 1..80: note = Synthetic: >MK472067_11-cand-450-529
  source 1..80: mol_type = other DNA
acactaatgttgtttggcagcatttgaaagaaccattggttgttaatgttatgccttttatttatttaacttttttaact

SEQ ID NO: 20577 - DNA, 80 bp, synthetic construct
  misc_feature 1..80: note = Synthetic: >MK472067_11-cand-550-629
  source 1..80: mol_type = other DNA
gcgtggcattttgttatatttttatttacagtattttaatgttgcgtgtgttgcattaggtcttcaagatttgttgtggg

SEQ ID NO: 20578 - DNA, 80 bp, synthetic construct
  misc_feature 1..80: note = Synthetic: >MK472067_12-cand-0-79
  source 1..80: mol_type = other DNA
atatgcatcaagcttgcttttaaaggcgtataaatcagtttttgcaaatgatggtataccgcttttgcctctattgagtg

SEQ ID NO: 20579 - DNA, 80 bp, synthetic construct
  misc_feature 1..80: note = Synthetic: >MK472067_12-cand-50-129
  source 1..80: mol_type = other DNA
atggtataccgcttttgcctctattgagtgttggtatatttaaagtgcctattactgtttctatggaggcgctcttggct

SEQ ID NO: 20580 - DNA, 80 bp, synthetic construct
  misc_feature 1..80: note = Synthetic: >MK472067_12-cand-140-219
  source 1..80: mol_type = other DNA
atagggattgtgtttgcttttgttatggcgctgaagaacaggttgtcatacaggagtgtgttgcagcgatagtagacaaa

SEQ ID NO: 20581 - DNA, 80 bp, synthetic construct
  misc_feature 1..80: note = Synthetic: >MK472067_12-cand-230-309
  source 1..80: mol_type = other DNA
ctgacgttactgtacaacctgttagccaacaagtgttcgaaccctaccgtgttgaaggatctgtgtccttttatcgggcg

SEQ ID NO: 20582 - DNA, 80 bp, synthetic construct
  misc_feature 1..80: note = Synthetic: >MK472067_12-cand-320-399
  source 1..80: mol_type = other DNA
acttttgtgctttaggcgctgagaagatagtcttcttcacttcgccacaactagacatgtgtgatacagccaaggcattt

SEQ ID NO: 20583 - DNA, 80 bp, synthetic construct
  misc_feature 1..80: note = Synthetic: >MK472067_12-cand-410-489
  source 1..80: mol_type = other DNA
gtaaaggtgctttaagtgtcgccattgacacatacaaacaacacacaccagtagtacctgctggaaactgtgtagttttg

SEQ ID NO: 20584 - DNA, 80 bp, synthetic construct
  misc_feature 1..80: note = Synthetic: >MK472067_12-cand-500-579
  source 1..80: mol_type = other DNA
gtttcttaactgtggttcttgttgtgcttcctacacaaggtcctaattatgaaaagaattataaacgcgccacttctaag

SEQ ID NO: 20585 - DNA, 80 bp, synthetic construct
  misc_feature 1..80: note = Synthetic: >MK472067_12-cand-590-669
  source 1..80: mol_type = other DNA
taaaaggtaaacttttggtggcatgtgaagaccccacactttttaaaactattgcacatgttcctgttgtaggttttatc

SEQ ID NO: 20586 - DNA, 80 bp, synthetic construct
  misc_feature 1..80: note = Synthetic: >MK472067_12-cand-680-759
  source 1..80: mol_type = other DNA
acaatgcagctaagttttacccagctgtgtgcgttgtaccagtcactgaagattcacgcaatgttatgttgcgtgaatta

SEQ ID NO: 20587 - DNA, 80 bp, synthetic construct
  misc_feature 1..80: note = Synthetic: >MK472067_12-cand-750-829
  source 1..80: mol_type = other DNA
gcgtgaattagatgccaccaagacttatggtgaacagttgggtgactgtgtactagagggtaaagttgtgactaatacaa

SEQ ID NO: 20588 - DNA, 80 bp, synthetic construct
  misc_feature 1..80: note = Synthetic: >MK472067_13-cand-0-79
  source 1..80: mol_type = other DNA
caattaataatgcagagcaattttgtgttaatacgcgccagttcacactcaaaacagacctctatattgggcctgggcct

SEQ ID NO: 20589 - DNA, 80 bp, synthetic construct
  misc_feature 1..80: note = Synthetic: >MK472067_13-cand-80-159
  source 1..80: mol_type = other DNA
ccttttacgtatgcgcgtcttgagagtaaatgtccatttacactcgactcacttaataattatttgtcttttagcaagtt

SEQ ID NO: 20590 - DNA, 80 bp, synthetic construct
  misc_feature 1..80: note = Synthetic: >MK472067_13-cand-170-249
  source 1..80: mol_type = other DNA
tttacctcactcgcggcctcttgtactatagatgtgtatggtcattatgcctatggtcttgctaatggtcagacgtttcg

SEQ ID NO: 20591 - DNA, 80 bp, synthetic construct
  misc_feature 1..80: note = Synthetic: >MK472067_13-cand-260-339
  source 1..80: mol_type = other DNA
ttggtcactactatgtactttcagcatgcacctggggagttgctcactggaactcctaagccattgcatggcttagaaga

SEQ ID NO: 20592 - DNA, 80 bp, synthetic construct
  misc_feature 1..80: note = Synthetic: >MK472067_13-cand-350-429
  source 1..80: mol_type = other DNA
ttgaacctagatgtgtgtacgaagtacactatttatggttttaaaggtgagggcatcatccgtgaaaccaacaccagtta

SEQ ID NO: 20593 - DNA, 80 bp, synthetic construct
  misc_feature 1..80: note = Synthetic: >MK472067_13-cand-440-519
  source 1..80: mol_type = other DNA
atatattatacctctgaggctggtcagttgttggcttttaagaatgtgactagtggtgttgtttactcagttactccatg

SEQ ID NO: 20594 - DNA, 80 bp, synthetic construct
  misc_feature 1..80: note = Synthetic: >MK472067_13-cand-530-609
  source 1..80: mol_type = other DNA
caacaggctgcatttatagatggggatattgttggtgtcatttcgagtctttctaattctacctttaatgctaccagaga

SEQ ID NO: 20595 - DNA, 80 bp, synthetic construct
  misc_feature 1..80: note = Synthetic: >MK472067_13-cand-620-699
  source 1..80: mol_type = other DNA
ttttattatcactctaatgatgctgacaattgcacagaccctgtcctcgtttatagtaacattggtgtttgccgtagtgg

SEQ ID NO: 20596 - DNA, 80 bp, synthetic construct
  misc_feature 1..80: note = Synthetic: >MK472067_13-cand-710-789
  source 1..80: mol_type = other DNA
tacgtgccaccacgtgaaaaccagcctaaattggcgcctatggtcactggtaatattagcattcccaccaattttacaat

SEQ ID NO: 20597 - DNA, 80 bp, synthetic construct
  misc_feature 1..80: note = Synthetic: >MK472067_13-cand-800-879
  source 1..80: mol_type = other DNA
actgagtatttgcaattatataacgctcctgtgagtgttgattgcgctatgtacgtctgtaatggcaatgaacgttgcaa

SEQ ID NO: 20598 - DNA, 80 bp, synthetic construct
  misc_feature 1..80: note = Synthetic: >MK472067_13-cand-850-929
  source 1..80: mol_type = other DNA
gtacgtctgtaatggcaatgaacgttgcaaacaattacttacacaatacacttctgcttgcaacgctatacagacttcgt

SEQ ID NO: 20599 - DNA, 80 bp, synthetic construct
  misc_feature 1..80: note = Synthetic: >MK472067_14-cand-0-79
  source 1..80: mol_type = other DNA
cagagtaaggagcgacctttgcttgaagttccagagtggaggcgtgtgcccaagggtcagaacactgtagaattgtgttt

SEQ ID NO: 20600 - DNA, 80 bp, synthetic construct
  misc_feature 1..80: note = Synthetic: >MK472067_14-cand-90-169
  source 1..80: mol_type = other DNA
ggcggttttaaaaattttggaggcccggattttgttgagaagggcatagaagcttctggctacccccaggctgcagctct

SEQ ID NO: 20601 - DNA, 80 bp, synthetic construct
  misc_feature 1..80: note = Synthetic: >MK472067_14-cand-180-259
  source 1..80: mol_type = other DNA
ggtgctgctttgctttttggaggtaatgtcactgcgagagaactacaagacagcgttgagctaacttacacctataaaat

SEQ ID NO: 20602 - DNA, 80 bp, synthetic construct
  misc_feature 1..80: note = Synthetic: >MK472067_14-cand-270-349
  source 1..80: mol_type = other DNA
aaagacgatcccaacttgcagctacttcttgcgcagattgacgcctataaagaaggtgtcaaacctcagcgcaagaagga

SEQ ID NO: 20603 - DNA, 80 bp, synthetic construct
  misc_feature 1..80: note = Synthetic: >MK472067_14-cand-360-439
  source 1..80: mol_type = other DNA
cgtgccagccagtctgatgcatcaaatgaacatgtcgacgttgtcactgatggtgctgtgccagacaaaactgttcttga

SEQ ID NO: 20604 - DNA, 80 bp, synthetic construct
  misc_feature 1..80: note = Synthetic: >MK472067_14-cand-440-519
  source 1..80: mol_type = other DNA
gtgggacacgtcagcagatctcgattctaatgtagagatcgttaatgaagtgtttgatgtttccaactaaacatgaagct

SEQ ID NO: 20605 - DNA, 80 bp, synthetic construct
  misc_feature 1..80: note = Synthetic: >MK472067_14-cand-530-609
  source 1..80: mol_type = other DNA
tttgctctttttagtagtcttgttttagttcattgtaaaccgattaccctaccttttaggatacgcatacctcctacaac

SEQ ID NO: 20606 - DNA, 80 bp, synthetic construct
  misc_feature 1..80: note = Synthetic: >MK472067_14-cand-610-689
  source 1..80: mol_type = other DNA
taggtacacatttgacattgagacacattgccgtcacttcttggatgtggggaagcccaagttttattatcattgcatgg

SEQ ID NO: 20607 - DNA, 80 bp, synthetic construct
  misc_feature 1..80: note = Synthetic: >MK472067_14-cand-700-779
  source 1..80: mol_type = other DNA
tgagtccactaaagggatgtacttaaatctcgtacagactattgagctgaacggaaagaagtacaggttcccaattgacc

SEQ ID NO: 20608 - DNA, 80 bp, synthetic construct
  misc_feature 1..80: note = Synthetic: >MK472067_14-cand-790-869
  source 1..80: mol_type = other DNA
gtcacaccacaacatttatgatgttgttcttggtgagctgcttgatggtgacgagttgtgattcaactaacgacatgttt

SEQ ID NO: 20609 - DNA, 80 bp, synthetic construct
  misc_feature 1..80: note = Synthetic: >MK472067_14-cand-880-959
  source 1..80: mol_type = other DNA
tattagcctttgtcactctgtcacccattatccattggattgctgagtgtgtcagagtcacattacggcttacagtagcc

SEQ ID NO: 20610 - DNA, 80 bp, synthetic construct
  misc_feature 1..80: note = Synthetic: >MK472067_15-cand-0-79
  source 1..80: mol_type = other DNA
gcaattcaatgtaagccgatgatgattgttacgcatgatgtcgggccgggtgatgttgttattacacgtgccaagcctcg

SEQ ID NO: 20611 - DNA, 80 bp, synthetic construct
  misc_feature 1..80: note = Synthetic: >MK472067_15-cand-80-159
  source 1..80: mol_type = other DNA
cagtgctgccatcaagtattacaaccacatgtttttgcggcatgttgccttgattgaaaatgttaatgtttggagggttg

SEQ ID NO: 20612 - DNA, 80 bp, synthetic construct
  misc_feature 1..80: note = Synthetic: >MK472067_15-cand-160-239
  source 1..80: mol_type = other DNA
tcaagctacagtcaagagatgggttagcctgttctggtaatgttgctgctcttcatgacgttggtgtcatggatgattgt

SEQ ID NO: 20613 - DNA, 80 bp, synthetic construct
  misc_feature 1..80: note = Synthetic: >MK472067_15-cand-240-319
  source 1..80: mol_type = other DNA
cattacagtaacaacacactcttggctagtgagttgaagctatgtcttttgagtggttgttttacagacaaggttaaggc

SEQ ID NO: 20614 - DNA, 80 bp, synthetic construct
  misc_feature 1..80: note = Synthetic: >MK472067_15-cand-320-399
  source 1..80: mol_type = other DNA
tgctatagtggctggtcatgtcactgttggtagtcagcatgttgatgtgcttgatgacattatgggcttgccatggttta

SEQ ID NO: 20615 - DNA, 80 bp, synthetic construct
  misc_feature 1..80: note = Synthetic: >MK472067_15-cand-400-479
  source 1..80: mol_type = other DNA
tacgaaaacttggtgatcttgctcttagtgcatgggagagtttgaagacagctattagagcgcttaaacttggcactgac

SEQ ID NO: 20616 - DNA, 80 bp, synthetic construct
  misc_feature 1..80: note = Synthetic: >MK472067_15-cand-480-559
  source 1..80: mol_type = other DNA
caacttatcctgtttgctaagaatttagcaacagctgctgtgcgagttgccaaaggtgcgttccagtttgttgttgacgt

SEQ ID NO: 20617 - DNA, 80 bp, synthetic construct
  misc_feature 1..80: note = Synthetic: >MK472067_15-cand-560-639
  source 1..80: mol_type = other DNA
accacctagctttgttaaggtctttgacacttttcttgccactcttaacaatttgtttgctaatgcagtggagcacctta

SEQ ID NO: 20618 - DNA, 80 bp, synthetic construct
  misc_feature 1..80: note = Synthetic: >MK472067_15-cand-640-719
  source 1..80: mol_type = other DNA
agattggtgctcacacttttgctagagttggtgactttgtttgttttgatagtgcacttgtcaagttgatgcctactaaa

SEQ ID NO: 20619 - DNA, 80 bp, synthetic construct
  misc_feature 1..80: note = Synthetic: >MK472067_15-cand-720-799
  source 1..80: mol_type = other DNA
gttcgtggcaagaaacagtgtggcatagatagagttttctatactaatgcattgtttggtcaaacacacaaagttaagtc

SEQ ID NO: 20620 - DNA, 80 bp, synthetic construct
  misc_feature 1..80: note = Synthetic: >MK472067_15-cand-800-879
  source 1..80: mol_type = other DNA
ttcatgtgttgagaaatgtgatatcaattttactctgtttgaccagcaagtccctgtctttaatacgggcaagactgtag

SEQ ID NO: 20621 - DNA, 80 bp, synthetic construct
  misc_feature 1..80: note = Synthetic: >MK472067_15-cand-880-959
  source 1..80: mol_type = other DNA
ttgtaggtggtatggcattctttgagagtgatgggttttataggtttatgtcagatgccgactctgtacttgaagagcca

SEQ ID NO: 20622 - DNA, 80 bp, synthetic construct
  misc_feature 1..80: note = Synthetic: >MK472067_15-cand-960-1039
  source 1..80: mol_type = other DNA
gtttttagatctgcctttgagcaggaaccggtatttgaatgtacaaaacctaaaggatttgtcataccagctgcatccaa

SEQ ID NO: 20623 - DNA, 80 bp, synthetic construct
  misc_feature 1..80: note = Synthetic: >MK472067_15-cand-1040-1119
  source 1..80: mol_type = other DNA
ccttgttgaactttgtgttaggttggaaaatgcattgcgcccatttaataagtcctattgtacttatagcacaatcatcc

SEQ ID NO: 20624 - DNA, 80 bp, synthetic construct
  misc_feature 1..80: note = Synthetic: >MK472067_15-cand-1120-1199
  source 1..80: mol_type = other DNA
gtgatgatcggtgtgttgttaagtgtactactgcttttgtagctcccgattgtttggctgacaaacagcggtttgttgag

SEQ ID NO: 20625 - DNA, 80 bp, synthetic construct
  misc_feature 1..80: note = Synthetic: >MK472067_15-cand-1210-1289
  source 1..80: mol_type = other DNA
ttatgatggatcatgaggattttaatgacttctacaccgctgcttgcgaagctgttgcgttacaacagttcgttgccttg

SEQ ID NO: 20626 - DNA, 80 bp, synthetic construct
  misc_feature 1..80: note = Synthetic: >MK472067_15-cand-1300-1379
  source 1..80: mol_type = other DNA
attttgcttgtttcataccatctctgcctgagtgtccttcattatttgacaccatagatggtggtgttatttggaggaat

SEQ ID NO: 20627 - DNA, 80 bp, synthetic construct
  misc_feature 1..80: note = Synthetic: >MK472067_2-cand-20-99
  source 1..80: mol_type = other DNA
tgtgtggttcagatggcaaacctgttttgcagcgtggtgattggagctttatggatcattttgaagacaatgatcaagtg

SEQ ID NO: 20628 - DNA, 80 bp, synthetic construct
  misc_feature 1..80: note = Synthetic: >MK472067_3-cand-30-109
  source 1..80: mol_type = other DNA
tgtaatatttaatgctacaactctttgtttcctaaatggcaaagcttcacagtttagtgagaaaccatttagtgttcttg

SEQ ID NO: 20629 - DNA, 80 bp, synthetic construct
  misc_feature 1..80: note = Synthetic: >MK472067_4-cand-20-99
  source 1..80: mol_type = other DNA
tcgcgtgactttgttacctatggctttgctatattggcggcttgttataattatttttatgtggctgacaatttaagttg

SEQ ID NO: 20630 - DNA, 80 bp, synthetic construct
  misc_feature 1..80: note = Synthetic: >MK472067_5-cand-30-109
  source 1..80: mol_type = other DNA
gtcgtcaaattatgggttttacctcgttgacagacgagtttactatgtcagaagttgtgaaacaaatgttcggtgtcact

SEQ ID NO: 20631 - DNA, 80 bp, synthetic construct
  misc_feature 1..80: note = Synthetic: >MK472067_6-cand-0-79
  source 1..80: mol_type = other DNA
gtttaggaggttttataatgcttattggtatttgtgtgccattattttgttggttttcttttctctgagtttccttgatt

SEQ ID NO: 20632 - DNA, 80 bp, synthetic construct
  misc_feature 1..80: note = Synthetic: >MK472067_6-cand-110-189
  source 1..80: mol_type = other DNA
atgaattcaggtatatagaaaatggccaacttaaagattttgacaaaccacttgattgtgttcataatgtttttgataac

SEQ ID NO: 20633 - DNA, 80 bp, synthetic construct
  misc_feature 1..80: note = Synthetic: >MK472067_7-cand-0-79
  source 1..80: mol_type = other DNA
ctgtgttgagaaacttactaaagagttagagacactacaagtttgttgtgataccatttgtggctgtggcccctccgagc

SEQ ID NO: 20634 - DNA, 80 bp, synthetic construct
  misc_feature 1..80: note = Synthetic: >MK472067_7-cand-130-209
  source 1..80: mol_type = other DNA
tcttatggtgtttgtagtgtctgtaaggagacgctgatccatacgtttaagtctattaaaggaacaggcattttttgtcg

SEQ ID NO: 20635 - DNA, 80 bp, synthetic construct
  misc_feature 1..80: note = Synthetic: >MK472067_8-cand-0-79
  source 1..80: mol_type = other DNA
gttaatgatacctctgttttgctttctgaaggcgctatagttttacattcagttagtggcgctaatttgtcctttgaatg

SEQ ID NO: 20636 - DNA, 80 bp, synthetic construct
  misc_feature 1..80: note = Synthetic: >MK472067_8-cand-60-139
  source 1..80: mol_type = other DNA
gctaatttgtcctttgaatgtggcaactcaacaaccccgccaagtactttgtatacatcacttttaggtgaacgagttgt

SEQ ID NO: 20637 - DNA, 80 bp, synthetic construct
  misc_feature 1..80: note = Synthetic: >MK472067_8-cand-190-269
  source 1..80: mol_type = other DNA
cttcttataattttcttgccattttgcctaatgtagttagggaaattgttattaccaaatatggtagtgtctatgtgaat

SEQ ID NO: 20638 - DNA, 80 bp, synthetic construct
  misc_feature 1..80: note = Synthetic: >MK472067_9-cand-140-219
  source 1..80: mol_type = other DNA
ctatattttcataagcctactaatggcaatcctggcgcaactgcttggctgcgcatttgcaagtattcgaataaaacttt

SEQ ID NO: 20639 - DNA, 80 bp, synthetic construct
  misc_feature 1..80: note = Synthetic: >MK472067_9-cand-240-319
  source 1..80: mol_type = other DNA
tgggtgagatttcaactggtaaagcttgtcttattaatcaaagagtgccagcatttttccaagataacgttggtatcgtc

SEQ ID NO: 20640 - DNA, 80 bp, synthetic construct
  misc_feature 1..80: note = Synthetic: >MK472067_9-cand-340-419
  source 1..80: mol_type = other DNA
caatggtttgactgtgttcgccgacaaaatttaccgttttaacttgcctaacgcctggtctagagctgttgctcggtgtt

SEQ ID NO: 20641 - DNA, 80 bp, synthetic construct
  misc_feature 1..80: note = Synthetic: >MK472068_1-cand-40-119
  source 1..80: mol_type = other DNA
gacatgtctcgtggtgtctgcgttgtttgtgcgactgtcatcgttaacaacgtttcatatgtcatcacacagaattctct

SEQ ID NO: 20642 - DNA, 80 bp, synthetic construct
  misc_feature 1..80: note = Synthetic: >MK472068_10-cand-90-169
  source 1..80: mol_type = other DNA
tggcagtctcatgtaaccttacttggagcgcgtggatttttcatgcgctatgtagcgggtaatggtgcagcttcttttgg

SEQ ID NO: 20643 - DNA, 80 bp, synthetic construct
  misc_feature 1..80: note = Synthetic: >MK472068_10-cand-250-329
  source 1..80: mol_type = other DNA
ctcgaactgcgccctcctacaacgaccgtatgcttatacgcatctgtcgttggtcggccaacaaacaattgcacaaccct

SEQ ID NO: 20644 - DNA, 80 bp, synthetic construct
  misc_feature 1..80: note = Synthetic: >MK472068_10-cand-410-489
  source 1..80: mol_type = other DNA
tatttcttggactggtgacaccgtcacagtccatggacaccaacggctttataatgtcattgtgccaggtgctaaatact

SEQ ID NO: 20645 - DNA, 80 bp, synthetic construct
  misc_feature 1..80: note = Synthetic: >MK472068_10-cand-500-579
  source 1..80: mol_type = other DNA
tacatttgcatgtcaggagactcattcttgtggtcatcaacttgtttctgacatgattaccatcaacgccaccaccacta

SEQ ID NO: 20646 - DNA, 80 bp, synthetic construct
  misc_feature 1..80: note = Synthetic: >MK472068_10-cand-580-659
  source 1..80: mol_type = other DNA
acaatggttctgtcacgcagtaccaactttgtgaaacctgtgatggctttcctcaacatgtgtttgctgtggctcaagat

SEQ ID NO: 20647 - DNA, 80 bp, synthetic construct
  misc_feature 1..80: note = Synthetic: >MK472068_10-cand-740-819
  source 1..80: mol_type = other DNA
ttcttctcaaccacttattattgcgtgtttgtggcccgttcctgctcttagccctgatacaggtgttatttacttcaacc

SEQ ID NO: 20648 - DNA, 80 bp, synthetic construct
  misc_feature 1..80: note = Synthetic: >MK472068_10-cand-900-979
  source 1..80: mol_type = other DNA
tcttcctcaggcaccatacgtttgggtgttatttcctttgttactagtgacactatcttcaatttcacctgtagcaatag

SEQ ID NO: 20649 - DNA, 80 bp, synthetic construct
  misc_feature 1..80: note = Synthetic: >MK472068_10-cand-980-1059
  source 1..80: mol_type = other DNA
tagtaacccatctaatggcagtgttttcgcaattccttttggcattaaaaatcagccattttattgctttgttgcacaag

SEQ ID NO: 20650 - DNA, 80 bp, synthetic construct
  misc_feature 1..80: note = Synthetic: >MK472068_10-cand-1060-1139
  source 1..80: mol_type = other DNA
gctatgaaatggccgccaacaagacctttgttggtgttatgcctgcagacttgcgcgagattgtcgtttctaagtatggt

SEQ ID NO: 20651 - DNA, 80 bp, synthetic construct
  misc_feature 1..80: note = Synthetic: >MK472068_10-cand-1140-1219
  source 1..80: mol_type = other DNA
gccatttatttaaatggctataagttgttcagtctttcaccacttgaaggtgtcattcttaatctcactagtttagtggg

SEQ ID NO: 20652 - DNA, 80 bp, synthetic construct
  misc_feature 1..80: note = Synthetic: >MK472068_10-cand-1220-1299
  source 1..80: mol_type = other DNA
ctctgatttctggactgtggcttacgcacaggacgctgatgttctggtcgacattgaggacacatacattactaatgttc

SEQ ID NO: 20653 - DNA, 80 bp, synthetic construct
  misc_feature 1..80: note = Synthetic: >MK472068_10-cand-1300-1379
  source 1..80: mol_type = other DNA
tttactgtgactcagagctcaataaagttaaatgtcagcagcaacgccgttatttagataatggcttctatactgccaca

SEQ ID NO: 20654 - DNA, 80 bp, synthetic construct
  misc_feature 1..80: note = Synthetic: >MK472068_10-cand-1460-1539
  source 1..80: mol_type = other DNA
ggctaactacacaagagctcttacacttgagtgtgaaccttggaatggtaaagaaatcaccttacttgtgggaggacaag

SEQ ID NO: 20655 - DNA, 80 bp, synthetic construct
  misc_feature 1..80: note = Synthetic: >MK472068_10-cand-1540-1619
  source 1..80: mol_type = other DNA
tggttaatgtcagtgacaacgtttgtattgaaaccaatcggttttcactcaactttgtttttgacataataccacctaag

SEQ ID NO: 20656 - DNA, 80 bp, synthetic construct
  misc_feature 1..80: note = Synthetic: >MK472068_10-cand-1940-2019
  source 1..80: mol_type = other DNA
cataaccaaaactaatgctacctaccacactggtgtgtactatacagaccatagtggagctcttactagttttaaaaaca

SEQ ID NO: 20657 - DNA, 80 bp, synthetic construct
  misc_feature 1..80: note = Synthetic: >MK472068_10-cand-2030-2109
  source 1..80: mol_type = other DNA
ccaagtctatgctgttagaccttgtaacacacctgaacaacttgccataattaatgatgacattgttggtgtgatttcag

SEQ ID NO: 20658 - DNA, 80 bp, synthetic construct
  misc_feature 1..80: note = Synthetic: >MK472068_10-cand-2190-2269
  source 1..80: mol_type = other DNA
actgaacccataatcacttatggttcattgggcatttgtgcagatggctctataggtaaggctaagcttcgtgaagtgag

SEQ ID NO: 20659 - DNA, 80 bp, synthetic construct
  misc_feature 1..80: note = Synthetic: >MK472068_10-cand-2350-2429
  source 1..80: mol_type = other DNA
ttcagatttccatgcgctctgttattgtcgattgttctacttatgtttgcaacggcaatacgcgatgcttagagttgctg

SEQ ID NO: 20660 - DNA, 80 bp, synthetic construct
  misc_feature 1..80: note = Synthetic: >MK472068_10-cand-2430-2509
  source 1..80: mol_type = other DNA
aatcaatatgttactgcttgtaaatctgtggagaatgcactagccctcaacgcgcgtcttgaaagtcaagaggtgacaaa

SEQ ID NO: 20661 - DNA, 80 bp, synthetic construct
  misc_feature 1..80: note = Synthetic: >MK472068_11-cand-80-159
  source 1..80: mol_type = other DNA
cgtggccattgccactggtgctgaaatttcatgtgttggcttccttgacgttggtgaagccgtctcacattacagtgagg

SEQ ID NO: 20662 - DNA, 80 bp, synthetic construct
  misc_feature 1..80: note = Synthetic: >MK472068_11-cand-160-239
  source 1..80: mol_type = other DNA
ccgcaactaacggtttccaaggttgccgtttcatacctcttgattctggaaccaatgtcgattcactgttggacgatgat

SEQ ID NO: 20663 - DNA, 80 bp, synthetic construct
  misc_feature 1..80: note = Synthetic: >MK472068_11-cand-240-319
  source 1..80: mol_type = other DNA
gtcgtttgcatggtgatcggtgttgagtaccagctgaaaattggtgcatttggtgagcgtcctgacggtcttcgtggctg

SEQ ID NO: 20664 - DNA, 80 bp, synthetic construct
  misc_feature 1..80: note = Synthetic: >MK472068_11-cand-400-479
  source 1..80: mol_type = other DNA
acaactatctttgtgaccatactggtcgtcctgttgtgcctgaaaatgaatgggctttccaggactactttggtgacaat

SEQ ID NO: 20665 - DNA, 80 bp, synthetic construct
  misc_feature 1..80: note = Synthetic: >MK472068_11-cand-480-559
  source 1..80: mol_type = other DNA
gatactgtaacacttaatggtgttgcatactttaaggcatgggaagtcattcgtgatgatgtgccttacaaacagcaaac

SEQ ID NO: 20666 - DNA, 80 bp, synthetic construct
  misc_feature 1..80: note = Synthetic: >MK472068_11-cand-560-639
  source 1..80: mol_type = other DNA
acttatggctattagttccatcgcttggcttggtgaagcagcacataccctacctagtggtactgtgcgtaacactgcca

SEQ ID NO: 20667 - DNA, 80 bp, synthetic construct
  misc_feature 1..80: note = Synthetic: >MK472068_11-cand-640-719
  source 1..80: mol_type = other DNA
agggtgtcactaagagcaaagttgttgtgcttgctgagccttattctggcatttatgccaatgtgggcagccctttcatg

SEQ ID NO: 20668 - DNA, 80 bp, synthetic construct
  misc_feature 1..80: note = Synthetic: >MK472068_11-cand-720-799
  source 1..80: mol_type = other DNA
acaaatggaacttctatccttgatgttgtgccaaaaccgtgcttcttgcatgcatatgtgagttgcaagtgtggcagcaa

SEQ ID NO: 20669 - DNA, 80 bp, synthetic construct
  misc_feature 1..80: note = Synthetic: >MK472068_11-cand-800-879
  source 1..80: mol_type = other DNA
caaacattgggtggttggtgattggcatatgggttataaatctatgtgctgtggcaccaagtgtacgcccatttgctact

SEQ ID NO: 20670 - DNA, 80 bp, synthetic construct
  misc_feature 1..80: note = Synthetic: >MK472068_11-cand-880-959
  source 1..80: mol_type = other DNA
ctgctggatatgtggaaccaggcgatgtccttttcacatctgttggagctggcaagggtgttaagttctacaaagggctc

SEQ ID NO: 20671 - DNA, 80 bp, synthetic construct
  misc_feature 1..80: note = Synthetic: >MK472068_11-cand-960-1039
  source 1..80: mol_type = other DNA
acactcaaacatgtcggcattgctgacaaagttgctgtctggcgtgttaccaccacatttgatgtggatggttttgttag

SEQ ID NO: 20672 - DNA, 80 bp, synthetic construct
  misc_feature 1..80: note = Synthetic: >MK472068_11-cand-1040-1119
  source 1..80: mol_type = other DNA
ctgcaaccgctttgaagatgacttcgtcaattcctttgacacttgcagcgtcgaaaacacaacttcccttgcatgctcac

SEQ ID NO: 20673 - DNA, 80 bp, synthetic construct
  misc_feature 1..80: note = Synthetic: >MK472068_11-cand-1120-1199
  source 1..80: mol_type = other DNA
ttaagtatggtgtactgagtggtgagtacaatgagaaagttgtggacgcagtgagaaatggattggttgacatgtcactt

SEQ ID NO: 20674 - DNA, 80 bp, synthetic construct
  misc_feature 1..80: note = Synthetic: >MK472068_11-cand-1200-1279
  source 1..80: mol_type = other DNA
tcgtttcttgatgtctttgatgagctgctgtcattgccaaagtttctccataaacttggtgatcttggtactggcatctg

SEQ ID NO: 20675 - DNA, 80 bp, synthetic construct
  misc_feature 1..80: note = Synthetic: >MK472068_11-cand-1360-1439
  source 1..80: mol_type = other DNA
ccaccttagtggtggtcaatggtactttcaagctgcttgcacatgtaccagagtggatgacttctttcgtggcaaaactc

SEQ ID NO: 20676 - DNA, 80 bp, synthetic construct
  misc_feature 1..80: note = Synthetic: >MK472068_11-cand-1600-1679
  source 1..80: mol_type = other DNA
ctaactatgttagcattgtttgtggacctacaaagaaggtgaaggtgtcacgtgttgaagcaatgagccttaatctggtt

SEQ ID NO: 20677 - DNA, 80 bp, synthetic construct
  misc_feature 1..80: note = Synthetic: >MK472068_11-cand-1840-1919
  source 1..80: mol_type = other DNA
ccactgtcgacaaaaatggtggtggtgtgtctttcagtgaagtcgatgaagtccgtgaaattgtgcctgttcataaggtg

SEQ ID NO: 20678 - DNA, 80 bp, synthetic construct
  misc_feature 1..80: note = Synthetic: >MK472068_11-cand-1920-1999
  source 1..80: mol_type = other DNA
tacgttacctttgagtttgaggatgatgtaattaacaccgttctcaaaactgcgattggacacaagttcacctttgaagg

SEQ ID NO: 20679 - DNA, 80 bp, synthetic construct
  misc_feature 1..80: note = Synthetic: >MK472068_11-cand-2080-2159
  source 1..80: mol_type = other DNA
atgtctatgacgaagaaggtggtgaagatttcacacttccaatcatggtgtctcaatggcctttgactcagccttctgaa

SEQ ID NO: 20680 - DNA, 80 bp, synthetic construct
  misc_feature 1..80: note = Synthetic: >MK472068_11-cand-2330-2409
  source 1..80: mol_type = other DNA
gacttcaacttgcttacatctccaagttttggagttgttgcaagattctgcttttgacctttttaaggttggcagaacaa

SEQ ID NO: 20681 - DNA, 80 bp, synthetic construct
  misc_feature 1..80: note = Synthetic: >MK472068_11-cand-2410-2489
  source 1..80: mol_type = other DNA
atgcacttgtgaaacgctgctatgaggcttctaagctcatagttggttccatgggtgatgtttctgagtgtcttgaggct

SEQ ID NO: 20682 - DNA, 80 bp, synthetic construct
  misc_feature 1..80: note = Synthetic: >MK472068_11-cand-2890-2969
  source 1..80: mol_type = other DNA
tgctgaagaacaaaccagacaaggacaagcctaaaaagacacctgtacaggatttacctgctaaggtggaagttacacct

SEQ ID NO: 20683 - DNA, 80 bp, synthetic construct
  misc_feature 1..80: note = Synthetic: >MK472068_11-cand-2970-3049
  source 1..80: mol_type = other DNA
ttctgttcatataaaaatgtacagttttacagaggtgattttaaagatttggtttgcattcctcatgatttcgtggttaa

SEQ ID NO: 20684 - DNA, 80 bp, synthetic construct
  misc_feature 1..80: note = Synthetic: >MK472068_2-cand-20-99
  source 1..80: mol_type = other DNA
tggtcaagttacaaaacaatgagatcatgcctggcaaactcaaacagagagctatgaccgctgaaggtgatggcttctct

SEQ ID NO: 20685 - DNA, 80 bp, synthetic construct
  misc_feature 1..80: note = Synthetic: >MK472068_4-cand-0-79
  source 1..80: mol_type = other DNA
cacttgttttctatggttgttggtgcaccagaaggactcatgttcttgcacacagtgctcttgcctacgtcctataagga

SEQ ID NO: 20686 - DNA, 80 bp, synthetic construct
  misc_feature 1..80: note = Synthetic: >MK472068_4-cand-120-199
  source 1..80: mol_type = other DNA
tttgtgcttcgtgagccaggtcaagttctctttgagtctagtggtagttactatgtcacacctcgtaacatgtaccaacc

SEQ ID NO: 20687 - DNA, 80 bp, synthetic construct
  misc_feature 1..80: note = Synthetic: >MK472068_4-cand-240-319
  source 1..80: mol_type = other DNA
tgtgctgtcacctatgttaatgttacgtctgatgagttcagcaatattgtgccggactatatagatgttaacaaaacatt

SEQ ID NO: 20688 - DNA, 80 bp, synthetic construct
  misc_feature 1..80: note = Synthetic: >MK472068_4-cand-290-369
  source 1..80: mol_type = other DNA
gccggactatatagatgttaacaaaacattgaatgactttgcttctcaattgcctaattttacagcaccagagcttaact

SEQ ID NO: 20689 - DNA, 80 bp, synthetic construct
  misc_feature 1..80: note = Synthetic: >MK472068_5-cand-0-79
  source 1..80: mol_type = other DNA
gctgctgctcaagattgctaaatacctcgtctctactacaacgtttgttgttgaaaagcaaacagaaacaggttgttgtg

SEQ ID NO: 20690 - DNA, 80 bp, synthetic construct
  misc_feature 1..80: note = Synthetic: >MK472068_5-cand-50-129
  source 1..80: mol_type = other DNA
ttgaaaagcaaacagaaacaggttgttgtgatgagcgtcatcctgtcaaatgtccggttctaagtgctagtgtgcttaga

SEQ ID NO: 20691 - DNA, 80 bp, synthetic construct
  misc_feature 1..80: note = Synthetic: >MK472068_5-cand-310-389
  source 1..80: mol_type = other DNA
cactatgttgttgtggacaaagagggtacatcttttgatggtgatgaagtgaaaccagcttcattatctgacttgggtgt

SEQ ID NO: 20692 - DNA, 80 bp, synthetic construct
  misc_feature 1..80: note = Synthetic: >MK472068_6-cand-0-79
  source 1..80: mol_type = other DNA
ctttctaaaggctttggcggcaacaaaattttgggattttcatctttgactgatgagttcactgttggtgaagttctaaa

SEQ ID NO: 20693 - DNA, 80 bp, synthetic construct
  misc_feature 1..80: note = Synthetic: >MK472068_6-cand-220-299
  source 1..80: mol_type = other DNA
tcacacctatctttatgatggtttgtggcctctctgtgttccttacgggctttcttaagcataaaatgctttaccttaca

SEQ ID NO: 20694 - DNA, 80 bp, synthetic construct
  misc_feature 1..80: note = Synthetic: >MK472068_6-cand-400-479
  source 1..80: mol_type = other DNA
cactgatgtcttttgacatgcagggtgtactcaacattgtcatctgttgttttgttagcggactgcacttgtaccgcttt

SEQ ID NO: 20695 - DNA, 80 bp, synthetic construct
  misc_feature 1..80: note = Synthetic: >MK472068_7-cand-240-319
  source 1..80: mol_type = other DNA
agcatcaaatggaagagtccctattattttgtacttaacactagccaactagcctggattttaggcaaatgctggtatgt

SEQ ID NO: 20696 - DNA, 80 bp, synthetic construct
  misc_feature 1..80: note = Synthetic: >MK472068_7-cand-330-409
  source 1..80: mol_type = other DNA
atgtatgtatgtctccgcggaggcaactcatacgtaaagtttggtccacactttataccatttgtacgtactgataagtt

SEQ ID NO: 20697 - DNA, 80 bp, synthetic construct
  misc_feature 1..80: note = Synthetic: >MK472068_8-cand-120-199
  source 1..80: mol_type = other DNA
tgatgttcaaacgccacatgttgaggacaaaccctgtgttgaaccttacaacgtacagggtgatgttaaattctttcaat

SEQ ID NO: 20698 - DNA, 80 bp, synthetic construct
  misc_feature 1..80: note = Synthetic: >MK472068_8-cand-320-399
  source 1..80: mol_type = other DNA
atgctcttacaaatcgtggccctttaccagctggtaatgcattgacaattcgtgttgagggtgatgtagcacttgtgtgt

SEQ ID NO: 20699 - DNA, 80 bp, synthetic construct
  misc_feature 1..80: note = Synthetic: >MK472068_8-cand-420-499
  source 1..80: mol_type = other DNA
aatcggctccaagtcctatgacaaaaattgtcagcgtgtggttaataaagtttgtaaatatacaaactttgttgctaccg

SEQ ID NO: 20700 - DNA, 80 bp, synthetic construct
  misc_feature 1..80: note = Synthetic: >MK472068_8-cand-520-599
  source 1..80: mol_type = other DNA
tcaaaggtcttgcttaaagcaagtgctttttgggtcactcaaaagtcaaaactcattgttgacgctcactacaataaaga

SEQ ID NO: 20701 - DNA, 80 bp, synthetic construct
  misc_feature 1..80: note = Synthetic: >MK472068_8-cand-620-699
  source 1..80: mol_type = other DNA
cacatgacaattgtaactatgaaactttcaccctcgacacatcacaaacttttgattgtcaattaggtgtttgtaccgtc

SEQ ID NO: 20702 - DNA, 80 bp, synthetic construct
  misc_feature 1..80: note = Synthetic: >MK472068_9-cand-260-339
  source 1..80: mol_type = other DNA
tgctgccgtccgtgaggctcttgctggactaggcattactgctaacaccagctcaacacctcgtgcttcaggaaagaaca

SEQ ID NO: 20703 - DNA, 80 bp, synthetic construct
  misc_feature 1..80: note = Synthetic: >MK472068_9-cand-440-519
  source 1..80: mol_type = other DNA
ctgctttggtgaacgtgacgcagctcacaactttggtgatgcacagctcactcgccttggtgttgattatgcacactacc

SEQ ID NO: 20704 - DNA, 80 bp, synthetic construct
  misc_feature 1..80: note = Synthetic: >MK472068_9-cand-620-699
  source 1..80: mol_type = other DNA
caagatgaatgtgcccaagaaggatccatcacttgtgaggttcctaccacacatttcagctttttcagacaatgttgagg

SEQ ID NO: 20705 - DNA, 80 bp, synthetic construct
  misc_feature 1..80: note = Synthetic: >MK472068_9-cand-710-789
  source 1..80: mol_type = other DNA
gccagatgtcagtcttggtttcgtagctgacacaacaccccttccacagagactcccacgttccacttccatgcaaacac

SEQ ID NO: 20706 - DNA, 80 bp, synthetic construct
  misc_feature 1..80: note = Synthetic: >MK472068_9-cand-1100-1179
  source 1..80: mol_type = other DNA
ccctggacatggtgatatttacctacctacggcatcatctacttctgtgacaattgaaattgaaacaaatgctgagtgaa

SEQ ID NO: 20707 - DNA, 80 bp, synthetic construct
  misc_feature 1..80: note = Synthetic: >MK472069_1-cand-40-119
  source 1..80: mol_type = other DNA
gacatgtctcgtggtgtttgtgttgtttgtgcgactgtgatcgttaacaacgtttcatatgtcatcacacagaactctct

SEQ ID NO: 20708 - DNA, 80 bp, synthetic construct
  misc_feature 1..80: note = Synthetic: >MK472069_10-cand-90-169
  source 1..80: mol_type = other DNA
gaatggtaaagaaatcaccctacttgtgggtggacaagtggttaatgtcagtgacaatgtttgtattgaaacaaatcggt

SEQ ID NO: 20709 - DNA, 80 bp, synthetic construct
  misc_feature 1..80: note = Synthetic: >MK472069_10-cand-570-649
  source 1..80: mol_type = other DNA
tacagaccatagtggagctcttactagttttaaaaacaccactacgggtcaagtctatgctgttagaccttgtaacacac

SEQ ID NO: 20710 - DNA, 80 bp, synthetic construct
  misc_feature 1..80: note = Synthetic: >MK472069_10-cand-750-829
  source 1..80: mol_type = other DNA
ctattcgtcgaatagtcaagctaactgcactgaacccataatcacctatggttcattgggcatttgtgcagacggttcaa

SEQ ID NO: 20711 - DNA, 80 bp, synthetic construct
  misc_feature 1..80: note = Synthetic: >MK472069_10-cand-930-1009
  source 1..80: mol_type = other DNA
ggaatacattcagatttccatgcgctctgttatagtcgattgctctacttatgtttgcaacggcaacacgcgatgcttgg

SEQ ID NO: 20712 - DNA, 80 bp, synthetic construct
  misc_feature 1..80: note = Synthetic: >MK472069_10-cand-1020-1099
  source 1..80: mol_type = other DNA
ccagtatgttactgcttgtaaatctgtggagaatgcactaaccctcaacgcgcgccttgaaagtcaagaggtgacaaata

SEQ ID NO: 20713 - DNA, 80 bp, synthetic construct
  misc_feature 1..80: note = Synthetic: >MK472069_11-cand-270-349
  source 1..80: mol_type = other DNA
gtgaggctcttgctggattaggcattactgccaatactagcaacaaaacaccttgtgcccccggaaagaacacacctaag

SEQ ID NO: 20714 - DNA, 80 bp, synthetic construct
  misc_feature 1..80: note = Synthetic: >MK472069_11-cand-440-519
  source 1..80: mol_type = other DNA
cgctgttttggcgaacgtgacgcagctcacaactttggtgatgctcagctcactcgccttggtgttgactatgcacacta

SEQ ID NO: 20715 - DNA, 80 bp, synthetic construct
  misc_feature 1..80: note = Synthetic: >MK472069_11-cand-620-699
  source 1..80: mol_type = other DNA
tacaagatgaatgtgcccaagaaggacccctcacttgtgaggttcctaccacacatttcagctttctcagacaatgttga

SEQ ID NO: 20716 - DNA, 80 bp, synthetic construct
  misc_feature 1..80: note = Synthetic: >MK472069_11-cand-710-789
  source 1..80: mol_type = other DNA
atgccagatgtcagtcttggttttgtagccgacacaacaccccttccacagagactccctcgttccacttccatgcaaac

SEQ ID NO: 20717 - DNA, 80 bp, synthetic construct
  misc_feature 1..80: note = Synthetic: >MK472069_11-cand-1100-1179
  source 1..80: mol_type = other DNA
cgccctggacatggtgatatttacctatctacggcatcgtctacttctgtgacaattgaaattgaaacaaatgctgagta

SEQ ID NO: 20718 - DNA, 80 bp, synthetic construct; identical to SEQ ID NO: 20661
  misc_feature 1..80: note = Synthetic: >MK472069_12-cand-80-159
  source 1..80: mol_type = other DNA

SEQ ID NO: 20719 - DNA, 80 bp, synthetic construct
  misc_feature 1..80: note = Synthetic: >MK472069_12-cand-160-239
  source 1..80: mol_type = other DNA
ccgcaactaacggttttcaaggttgccgtttcatacctcttgattctggagccaatgtcgattcactgttggacgatgat

SEQ ID NO: 20720 - DNA, 80 bp, synthetic construct
  misc_feature 1..80: note = Synthetic: >MK472069_12-cand-240-319
  source 1..80: mol_type = other DNA
gtcgtttgcatggtgatcggtgttgggtaccagctgaaaattggtgcatttggtgagcgccctgacggtcttcgtggctg

SEQ ID NO: 20721 - DNA, 80 bp, synthetic construct
  misc_feature 1..80: note = Synthetic: >MK472069_12-cand-400-479
  source 1..80: mol_type = other DNA
acaactatctttgtgaccacactggtcgtcctgttgtgcctgaaaatgagtgggctttccaggactactttggtgacaat

SEQ ID NO: 20722 - DNA, 80 bp, synthetic construct
  misc_feature 1..80: note = Synthetic: >MK472069_12-cand-480-559
  source 1..80: mol_type = other DNA
gacactgtaacacttaatggtgttgcatactttaaggcatgggaagtcactcgtgacgatgtgccttacaaacagcaaac

SEQ ID NO: 20723 - DNA, 80 bp, synthetic construct
  misc_feature 1..80: note = Synthetic: >MK472069_12-cand-560-639
  source 1..80: mol_type = other DNA
actcatggctattagttccatcgattggcttggtgaaacagcacacaccctacctagtggtacagtgcgtaacactgcca

SEQ ID NO: 20724 - DNA, 80 bp, synthetic construct
  misc_feature 1..80: note = Synthetic: >MK472069_12-cand-640-719
  source 1..80: mol_type = other DNA
aaggtgtcactaagagcaaagttgttgtgcttgctgagccttatgctggtatttatgccaatgtgggcagcccttttatg

SEQ ID NO: 20725 - DNA, 80 bp, synthetic construct
  misc_feature 1..80: note = Synthetic: >MK472069_12-cand-720-799
  source 1..80: mol_type = other DNA
acaaatggaacttccatccttgatgtcgtgccaaaaccttgcttcttgcatgcatatgtgagttgcaaatgtggcagcaa

SEQ ID NO: 20726 - DNA, 80 bp, synthetic construct
  misc_feature 1..80: note = Synthetic: >MK472069_12-cand-800-879
  source 1..80: mol_type = other DNA
caagcactgggtggttggtgattggcatatgggttataaatctatgtgctgtggtaccaagtgtacgcctatttgctatt

SEQ ID NO: 20727 - DNA, 80 bp, synthetic construct
  misc_feature 1..80: note = Synthetic: >MK472069_12-cand-880-959
  source 1..80: mol_type = other DNA
ctgcaggatatgtggaaccaggcgatgtcctcttcacatctgtaggagctggcaagggtgtcaagttctataaagggctt

SEQ ID NO: 20728 - DNA, 80 bp, synthetic construct
  misc_feature 1..80: note = Synthetic: >MK472069_12-cand-960-1039
  source 1..80: mol_type = other DNA
acccttaaatatttaggcgttgctgacaaagttgctgtctggcgtgttaccaccacatttgatgtggatggttttgtcag

SEQ ID NO: 20729 - DNA, 80 bp, synthetic construct; identical to SEQ ID NO: 20672
  misc_feature 1..80: note = Synthetic: >MK472069_12-cand-1040-1119
  source 1..80: mol_type = other DNA

SEQ ID NO: 20730 - DNA, 80 bp, synthetic construct
  misc_feature 1..80: note = Synthetic: >MK472069_12-cand-1120-1199
  source 1..80: mol_type = other DNA
ttaagtacggtgtactcagtggtgaatacaatgagaaagttgtggatgcagtgagaaatggattgattgacatgtcactt

SEQ ID NO: 20731 - DNA, 80 bp, synthetic construct
  misc_feature 1..80: note = Synthetic: >MK472069_12-cand-1200-1279
  source 1..80: mol_type = other DNA
tcttttcttgatgtctttgatgacttgctgtcagtgccaaagtttctccataaacttggtgatcttggtactggaatctg

SEQ ID NO: 20732 - DNA, 80 bp, synthetic construct
  misc_feature 1..80: note = Synthetic: >MK472069_12-cand-1360-1439
  source 1..80: mol_type = other DNA
ccactttagtggtggtcaatggtaccttcaagctgcttgcacatgtaccagagtggatgacttctttcgtggaaaaactc

SEQ ID NO: 20733 - DNA, 80 bp, synthetic construct
  misc_feature 1..80: note = Synthetic: >MK472069_12-cand-1600-1679
  source 1..80: mol_type = other DNA
ctaactatgttagccttgtttgtggacctacaaagaaggtgaaggtgtcacgtgttgaagcaatgaaccttaacttggtt

SEQ ID NO: 20734 - DNA, 80 bp, synthetic construct; identical to SEQ ID NO: 20677
  misc_feature 1..80: note = Synthetic: >MK472069_12-cand-1840-1919
  source 1..80: mol_type = other DNA

SEQ ID NO: 20735 - DNA, 80 bp, synthetic construct
  misc_feature 1..80: note = Synthetic: >MK472069_12-cand-1920-1999
  source 1..80: mol_type = other DNA
tacgtcactttcgagtttgaggatgatgtaattaacaccgttctcaaaactgcgattggacacaaattcacctttgaggg

SEQ ID NO: 20736 - DNA, 80 bp, synthetic construct
  misc_feature 1..80: note = Synthetic: >MK472069_12-cand-2080-2159
  source 1..80: mol_type = other DNA
atgtctatgatgaagaaggtggtgaagacttcacacttccagtcatggtgtctcaatggcctttgacgcagccttctgaa

SEQ ID NO: 20737 - DNA, 80 bp, synthetic construct
  misc_feature 1..80: note = Synthetic: >MK472069_12-cand-2330-2409
  source 1..80: mol_type = other DNA
gacttcaacttgcttgcatctccaagttttggagttgttgcaggatgctgcctttgacctttttaaggttggcagaacaa

SEQ ID NO: 20738 - DNA, 80 bp, synthetic construct; identical to SEQ ID NO: 20681
  misc_feature 1..80: note = Synthetic: >MK472069_12-cand-2410-2489
  source 1..80: mol_type = other DNA

SEQ ID NO: 20739 - DNA, 80 bp, synthetic construct
  misc_feature 1..80: note = Synthetic: >MK472069_12-cand-2890-2969
  source 1..80: mol_type = other DNA
tgctgaagaacaaaccaggcaaggacaagcccaaaaagaaacctgtgcaggagttacctgttaaggtggaagttacacct

SEQ ID NO: 20740 - DNA, 80 bp, synthetic construct
  misc_feature 1..80: note = Synthetic: >MK472069_12-cand-2970-3049
  source 1..80: mol_type = other DNA
ttctgttcgtacaagaatgtacagttttacagaggtgagtttaaagatttggtttgcattcctcacgacttcgtggttaa

SEQ ID NO: 20741 - DNA, 80 bp, synthetic construct
  misc_feature 1..80: note = Synthetic: >MK472069_12-cand-3050-3129
  source 1..80: mol_type = other DNA
tgcagccaatgaacaactacagcatggtggaggtgtcgccaaggccattgatgattacaccagtggcttgcttcaagaag

SEQ ID NO: 20742 - DNA, 80 bp, synthetic construct
  misc_feature 1..80: note = Synthetic: >MK472069_12-cand-3130-3209
  source 1..80: mol_type = other DNA
tttccaacaaatatatcaaaacaaatggccctttgaagaagggacagggtgtcatgctcgagtgcaataacactaaaatt

SEQ ID NO: 20743 - DNA, 80 bp, synthetic construct
  misc_feature 1..80: note = Synthetic: >MK472069_12-cand-3210-3289
  source 1..80: mol_type = other DNA
ttgaatgttgttggaccccgaaagaagaagtcatctcttagtgcttgcaaaaatgcacttagagaagcatacaatgctgt

SEQ ID NO: 20744 - DNA, 80 bp, synthetic construct
  misc_feature 1..80: note = Synthetic: >MK472069_12-cand-3290-3369
  source 1..80: mol_type = other DNA
gttttcccacagtggtgtgcctcttacacctttgcttagtgtaggcatttttggtgttccacttgaaacttctttagagg

SEQ ID NO: 20745 - DNA, 80 bp, synthetic construct
  misc_feature 1..80: note = Synthetic: >MK472069_12-cand-3370-3449
  source 1..80: mol_type = other DNA
tttttcttgaagttgttggtgacaaacagtgtgcatgtttctgctacacagaggctgaggccgatggtatcaaacaacat

SEQ ID NO: 20746 - DNA, 80 bp, synthetic construct
  misc_feature 1..80: note = Synthetic: >MK472069_12-cand-3450-3529
  source 1..80: mol_type = other DNA
gttactaaaaacacaccggctgcagtaccagaaaaagctcttcagttgacgtctgatgttcagaggccacctgttgagaa

SEQ ID NO: 20747 - DNA, 80 bp, synthetic construct
  misc_feature 1..80: note = Synthetic: >MK472069_12-cand-3530-3609
  source 1..80: mol_type = other DNA
caaactctgtgttgaaccttacaacgtacagggtgatgttaagttctttcaatgttcagcccaacaaatcaccacactca

SEQ ID NO: 20748 - DNA, 80 bp, synthetic construct
  misc_feature 1..80: note = Synthetic: >MK472069_12-cand-3690-3769
  source 1..80: mol_type = other DNA
ggtgcattgaaagatgctcttacaaactgtggccctttaccagctggcaatgctttgacaattcgtgttgaaggtgatgt

SEQ ID NO: 20749 - DNA, 80 bp, synthetic construct
  misc_feature 1..80: note = Synthetic: >MK472069_12-cand-3770-3849
  source 1..80: mol_type = other DNA
tgcacttgtgtgttcaattttagttgtacccacaattggctccaagtcctatgacaaaaattgtcagcgtgtagttaaca

SEQ ID NO: 20750 - DNA, 80 bp, synthetic construct
  misc_feature 1..80: note = Synthetic: >MK472069_12-cand-3850-3929
  source 1..80: mol_type = other DNA
aggtttgtaaatacacaaactttgttgctaccgttcccccagctgaaatttttccaaaagtcttgcttaaagcaagtgct

SEQ ID NO: 20751 - DNA, 80 bp, synthetic construct
  misc_feature 1..80: note = Synthetic: >MK472069_12-cand-3930-4009
  source 1..80: mol_type = other DNA
ttttgggtcacacaaaagtcaaaacttattgttgacgctcactacaataaagagagagttactgttgttgttacacatga

SEQ ID NO: 20752 - DNA, 80 bp, synthetic construct
  misc_feature 1..80: note = Synthetic: >MK472069_12-cand-4010-4089
  source 1..80: mol_type = other DNA
caattgtaactatgaaactgtcaccctcgacacagcacaaacttttgattgtcaattaggtgtttgtactgtcaacaatg

SEQ ID NO: 20753 - DNA, 80 bp, synthetic construct
  misc_feature 1..80: note = Synthetic: >MK472069_2-cand-40-119
  source 1..80: mol_type = other DNA
ggaacctggtaagcctaaaccaccgcttaacagaaattctgtttttactggcttccaaattacaaaagactcaaaacacc

SEQ ID NO: 20754 - DNA, 80 bp, synthetic construct
  misc_feature 1..80: note = Synthetic: >MK472069_3-cand-0-79
  source 1..80: mol_type = other DNA
tagtgatgatgttcgtaccattcctggcattccatctggtgttatgctggttggtagaactctggttttcgccattaaga

SEQ ID NO: 20755 - DNA, 80 bp, synthetic construct
  misc_feature 1..80: note = Synthetic: >MK472069_3-cand-80-159
  source 1..80: mol_type = other DNA
ctgtgtttggtgaagctggtaactgctatgacacactaggcattgcacaaagtgctagttgcatctttacttctgcttgt

SEQ ID NO: 20756 - DNA, 80 bp, synthetic construct
  misc_feature 1..80: note = Synthetic: >MK472069_4-cand-0-79
  source 1..80: mol_type = other DNA
catctgttctctatggttgtcggtgcgccagaaggactcatgttcttgcacacagtgctcctgcctacgtcctataagga

SEQ ID NO: 20757 - DNA, 80 bp, synthetic construct
  misc_feature 1..80: note = Synthetic: >MK472069_4-cand-120-199
  source 1..80: mol_type = other DNA
tttgtgcttcgtgagccaggccaagttctctttgagtctagtggcaattactatgttacacctcgtaacatgtatcagcc

SEQ ID NO: 20758 - DNA, 80 bp, synthetic construct
  misc_feature 1..80: note = Synthetic: >MK472069_4-cand-170-249
  source 1..80: mol_type = other DNA
ctatgttacacctcgtaacatgtatcagccacgtgtgccaactattgctgattttgtgcaaattcagtcatgtgctgtta

SEQ ID NO: 20759 - DNA, 80 bp, synthetic construct; identical to SEQ ID NO: 20688
  misc_feature 1..80: note = Synthetic: >MK472069_4-cand-290-369
  source 1..80: mol_type = other DNA

SEQ ID NO: 20760 - DNA, 80 bp, synthetic construct
  misc_feature 1..80: note = Synthetic: >MK472069_5-cand-120-199
  source 1..80: mol_type = other DNA
taagtgctagtgtgcttaggagtggtgatgttgatggtgtttgtaagcatggccttaatatgtataagaaggttgtctca

SEQ ID NO: 20761 - DNA, 80 bp, synthetic construct; identical to SEQ ID NO: 20691
  misc_feature 1..80: note = Synthetic: >MK472069_5-cand-320-399
  source 1..80: mol_type = other DNA

SEQ ID NO: 20762 - DNA, 80 bp, synthetic construct
  misc_feature 1..80: note = Synthetic: >MK472069_5-cand-420-499
  source 1..80: mol_type = other DNA
cctttaagtttgttaaacaagctaagaaggaagtgcaaaaaccactgcctgtggaaccacaagtttctaagttagaaaca

SEQ ID NO: 20763 - DNA, 80 bp, synthetic construct
  misc_feature 1..80: note = Synthetic: >MK472069_6-cand-220-299
  source 1..80: mol_type = other DNA
gcagtatgttaatgcacttggcacttttgttggcatccaagacaacatttggcttttacagcttgtcccatttgacatct

SEQ ID NO: 20764 - DNA, 80 bp, synthetic construct
  misc_feature 1..80: note = Synthetic: >MK472069_6-cand-420-499
  source 1..80: mol_type = other DNA
gtattcctgttcagactgttgtgagtggtgcttcgaagacattttatgtcaatgcgagtggtggttacaaaccatactgc

SEQ ID NO: 20765 - DNA, 80 bp, synthetic construct
  misc_feature 1..80: note = Synthetic: >MK472069_7-cand-0-79
  source 1..80: mol_type = other DNA
ctttctaaaggctttggcggcaataaaattttgggattttcatctttgactgatgagttcactgttggtgaagtcctaaa

SEQ ID NO: 20766 - DNA, 80 bp, synthetic construct
  misc_feature 1..80: note = Synthetic: >MK472069_7-cand-210-289
  source 1..80: mol_type = other DNA
gctagtgccattacacctatctttatgatggtttgtggcctctctgtgttccttacaggttttcttaagcataaaatgct

SEQ ID NO: 20767 - DNA, 80 bp, synthetic construct
  misc_feature 1..80: note = Synthetic: >MK472069_7-cand-390-469
  source 1..80: mol_type = other DNA
tatcacacttcactgatgtcttttgacatgcagggtgttctcaacattgtcatttgttgctttgttagcggactacattt

SEQ ID NO: 20768 - DNA, 80 bp, synthetic construct
  misc_feature 1..80: note = Synthetic: >MK472069_8-cand-210-289
  source 1..80: mol_type = other DNA
atagctcggctcttgtaccttgttgtttttagcatcaaatggaagagtccctactattttgtacttaatactagccaact

SEQ ID NO: 20769 - DNA, 80 bp, synthetic construct
  misc_feature 1..80: note = Synthetic: >MK472069_8-cand-310-389
  source 1..80: mol_type = other DNA
gttggtatgtggacttagatatgtatgtatgtctccgtggaggcaactcatatttaaagtttggtccacactttatacca

SEQ ID NO: 20770 - DNA, 80 bp, synthetic construct
  misc_feature 1..80: note = Synthetic: >MK472069_8-cand-610-689
  source 1..80: mol_type = other DNA
gttggtgttccttcttatctttgtcttattgctctgtattacctttattaaactggtccaattatgcctcatctgccacc

SEQ ID NO: 20771 - DNA, 80 bp, synthetic construct
  misc_feature 1..80: note = Synthetic: >MK472069_8-cand-700-779
  source 1..80: mol_type = other DNA
aggtgcggtatatcagccaatttacaaggtttacagagtatacaaagactttatgcgaattgaacccatgcccactatcg

SEQ ID NO: 20772 - DNA, 80 bp, synthetic construct
  misc_feature 1..80: note = Synthetic: >MK472069_9-cand-80-159
  source 1..80: mol_type = other DNA
aataattggacctgtgatgtgtcttggacttctcataaaattttgcgtggtgcgcgcgggtttttcatgcgctacgtaag

SEQ ID NO: 20773 - DNA, 80 bp, synthetic construct
  misc_feature 1..80: note = Synthetic: >MK472069_9-cand-280-359
  source 1..80: mol_type = other DNA
taccaacgaccgtatgcttatacgcatctgtcgttggtcatccaacaaaccattgcacaacccatttagtgttgataaca

SEQ ID NO: 20774 - DNA, 80 bp, synthetic construct
  misc_feature 1..80: note = Synthetic: >MK472069_9-cand-460-539
  source 1..80: mol_type = other DNA
acatcaacggctttataatgtcatcgtgcctggtgctaaatactgggacgctgctacatttgcatgccagaagactgatt

SEQ ID NO: 20775 - DNA, 80 bp, synthetic construct
  misc_feature 1..80: note = Synthetic: >MK472069_9-cand-550-629
  source 1..80: mol_type = other DNA
tcaacttgtttctgacatgattaccatcaatgccaccaccagccccaatggttctattacacattaccaagtttgtgatg

SEQ ID NO: 20776 - DNA, 80 bp, synthetic construct
  misc_feature 1..80: note = Synthetic: >MK472069_9-cand-630-709
  source 1..80: mol_type = other DNA
tttgtgatggttttccacaacatgtgtttgctgtggcccaagatggtaaaatcccaccaggttttgactttactaattgg

SEQ ID NO: 20777 - DNA, 80 bp, synthetic construct
  misc_feature 1..80: note = Synthetic: >MK472069_9-cand-890-969
  source 1..80: mol_type = other DNA
gaccacttgcgttttgctcttaactcttcctcaggcaccatacgtctgggtgttatttcctttgttactggtgacactat

SEQ ID NO: 20778 - DNA, 80 bp, synthetic construct
  misc_feature 1..80: note = Synthetic: >MK472069_9-cand-970-1049
  source 1..80: mol_type = other DNA
ctttaatttcacctgtagcaatagtagtaacccctctaatggcagtgttttcgcaattccttttggcattaaacatcaac

SEQ ID NO: 20779 - DNA, 80 bp, synthetic construct
  misc_feature 1..80: note = Synthetic: >MK472070_1-cand-20-99
  source 1..80: mol_type = other DNA
ctgtttgacaaggtggtcaccaacgggctcggcacagttgaccaggattacaaaaagtgtgttgctaattttaaagacgc

SEQ ID NO: 20780 - DNA, 80 bp, synthetic construct
  misc_feature 1..80: note = Synthetic: >MK472070_10-cand-0-79
  source 1..80: mol_type = other DNA
tgccacgtgcctacactcacagctatgtccagctttatgttagttataataatagtggtggttctactacaggtccaccc

SEQ ID NO: 20781 - DNA, 80 bp, synthetic construct
  misc_feature 1..80: note = Synthetic: >MK472070_10-cand-90-169
  source 1..80: mol_type = other DNA
ccgttaagtttgttagctataatggttctgttatgactgacttgccagacatggtttgtgttggtacgacgcagtttaca

SEQ ID NO: 20782 - DNA, 80 bp, synthetic construct
  misc_feature 1..80: note = Synthetic: >MK472070_10-cand-180-259
  source 1..80: mol_type = other DNA
catatgttgcccaacctactccgccgtcatgggtgaatactcaaattgatgatttgagcttcaaactcaaaattcttgct

SEQ ID NO: 20783 - DNA, 80 bp, synthetic construct
  misc_feature 1..80: note = Synthetic: >MK472070_10-cand-270-349
  source 1..80: mol_type = other DNA
cgttcaattttgattcattgaaccatcacctttcgtttgaaagcatttgcttttctaccgagccgcaggctggttcgtgt

SEQ ID NO: 20784 - DNA, 80 bp, synthetic construct
  misc_feature 1..80: note = Synthetic: >MK472070_10-cand-360-439
  source 1..80: mol_type = other DNA
ttgttaaagtttgggcttattctgaattgccctttgcttcgctgtatgttactttcaaacgtggtaataaggttttaggt

SEQ ID NO: 20785 - DNA, 80 bp, synthetic construct
  misc_feature 1..80: note = Synthetic: >MK472070_10-cand-450-529
  source 1..80: mol_type = other DNA
cgcgtgttggtgtctttgatatctccgaagtttatgaagatgagtgctgtgaatacactatttacggcattacgggccgt

SEQ ID NO: 20786 - DNA, 80 bp, synthetic construct
  misc_feature 1..80: note = Synthetic: >MK472070_10-cand-540-619
  source 1..80: mol_type = other DNA
ccaagacaaatgttacttattttagtggtttgtactatcggtcttcgtctggtatgttgcttggttttaagaacgccacc

SEQ ID NO: 20787 - DNA, 80 bp, synthetic construct
  misc_feature 1..80: note = Synthetic: >MK472070_10-cand-750-829
  source 1..80: mol_type = other DNA
agatgtttttctaccacagtgatagtgctcgtaactgtaccaaccctgtccttacatactcgtctattggcgtgtgtgct

SEQ ID NO: 20788 - DNA, 80 bp, synthetic construct
  misc_feature 1..80: note = Synthetic: >MK472070_11-cand-0-79
  source 1..80: mol_type = other DNA
gtgtttgtgcacatggccttaagtatgttcatcgtgtggagtctgttaatggtagtgccatcatagttaatgttggcaag

SEQ ID NO: 20789 - DNA, 80 bp, synthetic construct
  misc_feature 1..80: note = Synthetic: >MK472070_11-cand-220-299
  source 1..80: mol_type = other DNA
cttgtctgcgttacctgttacgtcacttgttgtgcgtaataaagtttttcaagaccctgtcagccgtgtggagcgtaaag

SEQ ID NO: 20790 - DNA, 80 bp, synthetic construct
  misc_feature 1..80: note = Synthetic: >MK472070_11-cand-310-389
  source 1..80: mol_type = other DNA
ccttaacaatttggatgctgcatcagaaaatttcttctctattggtgatgttatttctcgtaatgttataacaacacttg

SEQ ID NO: 20791 - DNA, 80 bp, synthetic construct
  misc_feature 1..80: note = Synthetic: >MK472070_11-cand-400-479
  source 1..80: mol_type = other DNA
tagtatgcttagcatagtttttaaagcctgtaggaaaaaagattttaaagtgtttgcactggctcccgaacgtactggtg

SEQ ID NO: 20792 - DNA, 80 bp, synthetic construct
  misc_feature 1..80: note = Synthetic: >MK472070_11-cand-490-569
  source 1..80: mol_type = other DNA
tcgtagtctgcgttataatgctaaagcagtgtaccatgtggctactactaagtcgcgttgggtacttttgtttttaaagc

SEQ ID NO: 20793 - DNA, 80 bp, synthetic construct
  misc_feature 1..80: note = Synthetic: >MK472070_11-cand-580-659
  source 1..80: mol_type = other DNA
gttgtatacagtttatgcttgtatgttcttgtttgttcgttttggtcctgttaacgattacgtctgttcagactacgttt

SEQ ID NO: 20794 - DNA, 80 bp, synthetic construct
  misc_feature 1..80: note = Synthetic: >MK472070_11-cand-670-749
  source 1..80: mol_type = other DNA
agaatcaaattttgacaagaatgcattttgcagttcacctttgtgtaaggcttgtttgtatggctaccaggagcttgctg

SEQ ID NO: 20795 - DNA, 80 bp, synthetic construct
  misc_feature 1..80: note = Synthetic: >MK472070_11-cand-760-839
  source 1..80: mol_type = other DNA
caccaatatggtttgggaacatttacatgacccgcttatagatagtgttttgccgatgtgttatttggcgtttttagcta

SEQ ID NO: 20796 - DNA, 80 bp, synthetic construct
  misc_feature 1..80: note = Synthetic: >MK472070_11-cand-850-929
  source 1..80: mol_type = other DNA
ttatgttgttagagctatgtgtctttattttgtggcccaatatgttaatttatttggcagtagttttgggcttcaggata

SEQ ID NO: 20797 - DNA, 80 bp, synthetic construct
  misc_feature 1..80: note = Synthetic: >MK472070_12-cand-0-79
  source 1..80: mol_type = other DNA
ggctttgtttcaggttatttgcctgagatgaccacttctaaatggttttgtcagtatggtcagcacacgtggtctaatgt

SEQ ID NO: 20798 - DNA, 80 bp, synthetic construct
  misc_feature 1..80: note = Synthetic: >MK472070_12-cand-50-129
  source 1..80: mol_type = other DNA
tcagtatggtcagcacacgtggtctaatgtgcatggacttttttctgtgtacactagtactcgtcgtgattttgtcctca

SEQ ID NO: 20799 - DNA, 80 bp, synthetic construct
  misc_feature 1..80: note = Synthetic: >MK472070_12-cand-140-219
  source 1..80: mol_type = other DNA
tgccacagctgatgaggccataaatggttggtcattgtattttgctgtttcccctattgccaattctaatagtgatgctg

SEQ ID NO: 20800 - DNA, 80 bp, synthetic construct
  misc_feature 1..80: note = Synthetic: >MK472070_12-cand-230-309
  source 1..80: mol_type = other DNA
ctgtaaatttgggtctcataaagctgtgacctttaacttaaacacacaggctgagtgcatcatcaatgagcgtttcaaca

SEQ ID NO: 20801 - DNA, 80 bp, synthetic construct
  misc_feature 1..80: note = Synthetic: >MK472070_12-cand-320-399
  source 1..80: mol_type = other DNA
tgacggtcagtcatacatttttggtgtgacttggtctggtaccactgttaggttgtacttgccaaagcgcaattatgcct

SEQ ID NO: 20802 - DNA, 80 bp, synthetic construct
  misc_feature 1..80: note = Synthetic: >MK472070_12-cand-410-489
  source 1..80: mol_type = other DNA
aaataattggagtcgggctacagctttctgtgaacatgctaatgcgtgtgctatgcaagaagtgcgcgatcttgtaactt

SEQ ID NO: 20803 - DNA, 80 bp, synthetic construct
  misc_feature 1..80: note = Synthetic: >MK472070_12-cand-500-579
  source 1..80: mol_type = other DNA
aactggcgctgatggtggtattaccagttatgacttatgtcgttcttgtaatggttttccgcaacatgtttttagcttac

SEQ ID NO: 20804 - DNA, 80 bp, synthetic construct
  misc_feature 1..80: note = Synthetic: >MK472070_12-cand-590-669
  source 1..80: mol_type = other DNA
tgctttgcctttggatttctcgtttgacaactggttccttcttaccaattcgtcttctcttatagaaggtcgcgttgtgt

SEQ ID NO: 20805 - DNA, 80 bp, synthetic construct
  misc_feature 1..80: note = Synthetic: >MK472070_12-cand-680-759
  source 1..80: mol_type = other DNA
tctcagactcaattgtttgtggcctatacctcaacttctttcaactggcactgtcatttattttaatggcactgctaaag

SEQ ID NO: 20806 - DNA, 80 bp, synthetic construct
  misc_feature 1..80: note = Synthetic: >MK472070_12-cand-770-849
  source 1..80: mol_type = other DNA
taatggttacaaccggagtggtgaggctgacgcactacgtttttccctcaatttcaccgatagtagaccttttggtggtg

SEQ ID NO: 20807 - DNA, 80 bp, synthetic construct
  misc_feature 1..80: note = Synthetic: >MK472070_12-cand-870-949
  source 1..80: mol_type = other DNA
attggtagttttcatgtcggtttcagttgtactaatgatacaaaagttattggccgtggatttataccatttggccgatc

SEQ ID NO: 20808 - DNA, 80 bp, synthetic construct
  misc_feature 1..80: note = Synthetic: >MK472070_13-cand-0-79
  source 1..80: mol_type = other DNA
ttgccgttggttttaagtttggcgtcctaagtggcgtctttgactccgacgttaaggctgctgtggcaactgggttgtat

SEQ ID NO: 20809 - DNA, 80 bp, synthetic construct
  misc_feature 1..80: note = Synthetic: >MK472070_13-cand-80-159
  source 1..80: mol_type = other DNA
gatgttggtaactgcatttgtgatgtcattgatgacatacttacaaaaccaagttttgtgcgccgactggaagaacttgt

SEQ ID NO: 20810 - DNA, 80 bp, synthetic construct
  misc_feature 1..80: note = Synthetic: >MK472070_13-cand-160-239
  source 1..80: mol_type = other DNA
tggtggtgcttgggaaatatttgttaatgcagttaaagttgtaggctgtcgtgctagtgactttatcaagttggtgaagt

SEQ ID NO: 20811 - DNA, 80 bp, synthetic construct
  misc_feature 1..80: note = Synthetic: >MK472070_13-cand-240-319
  source 1..80: mol_type = other DNA
cattttctacagctgtgttctcagtggtcaacggtgctattcactttgagatggatgtacctgagtgctttgctagtgct

SEQ ID NO: 20812 - DNA, 80 bp, synthetic construct
  misc_feature 1..80: note = Synthetic: >MK472070_13-cand-320-399
  source 1..80: mol_type = other DNA
tatagtgctttcagagactttgtgttgacactgtttgaattgtcagttaaaactgtcaatgtggcaggtgtaaaacttcg

SEQ ID NO: 20813 - DNA, 80 bp, synthetic construct
  misc_feature 1..80: note = Synthetic: >MK472070_13-cand-400-479
  source 1..80: mol_type = other DNA
cgctgttggtgactatgtgctgtttaacaatgccattgttaaatttgtcactactaaggttaaaggttttagacaacagg

SEQ ID NO: 20814 - DNA, 80 bp, synthetic construct
  misc_feature 1..80: note = Synthetic: >MK472070_13-cand-480-559
  source 1..80: mol_type = other DNA
gcattaattctgttgagtatgccactgttgtctttggacctacacagcgtgttgagtcaagccgtgttgaggttagtaac

SEQ ID NO: 20815 - DNA, 80 bp, synthetic construct
  misc_feature 1..80: note = Synthetic: >MK472070_13-cand-560-639
  source 1..80: mol_type = other DNA
gcttcactagttgtggttgatgaggctactccacttgttacacgaggtgttacttgtgttattggtggtcgtgccttctt

SEQ ID NO: 20816 - DNA, 80 bp, synthetic construct
  misc_feature 1..80: note = Synthetic: >MK472070_13-cand-640-719
  source 1..80: mol_type = other DNA
tcatagtggtggttgttacagacttatggctgataatgatgctgtgctagagacacctgtttttaggtctttgtgcacat

SEQ ID NO: 20817 - DNA, 80 bp, synthetic construct
  misc_feature 1..80: note = Synthetic: >MK472070_13-cand-720-799
  source 1..80: mol_type = other DNA
tgacacctgtttttgactgtcctaaacctgaaggctttccagacattgttgcaactgatgttgcagaactttgtgttaaa

SEQ ID NO: 20818 - DNA, 80 bp, synthetic construct
  misc_feature 1..80: note = Synthetic: >MK472070_13-cand-800-879
  source 1..80: mol_type = other DNA
gttgaagacgcacttaaggagttttcaacaccttacaggacttttactgttaatgtctatgatgagctctgtgttgtgaa

SEQ ID NO: 20819 - DNA, 80 bp, synthetic construct
  misc_feature 1..80: note = Synthetic: >MK472070_13-cand-880-959
  source 1..80: mol_type = other DNA
ccacgttttggtttttgaaacaccgggtgttgttgtggactctgttaagttctgtgaattgtgtaaatgctcctatctta

SEQ ID NO: 20820 - DNA, 80 bp, synthetic construct
  misc_feature 1..80: note = Synthetic: >MK472070_13-cand-960-1039
  source 1..80: mol_type = other DNA
aacctgggtttgatttgttctatcgtgaagctttggctgtcactgatgtgtccaatttccccagttttgaaggttttgag

SEQ ID NO: 20821 - DNA, 80 bp, synthetic construct
  misc_feature 1..80: note = Synthetic: >MK472070_13-cand-1040-1119
  source 1..80: mol_type = other DNA
tgttttttgtgtccaccgtgtcctgatttgcttgtgcagattgatgatggtggtatctggaagacctttgttgcatcctt

SEQ ID NO: 20822 - DNA, 80 bp, synthetic construct
  misc_feature 1..80: note = Synthetic: >MK472070_13-cand-1120-1199
  source 1..80: mol_type = other DNA
gagcaacgcttttgatttttgtaagagtctcaagatttcttttggccttgatggtgttgttataagcactgttaagcgtt

SEQ ID NO: 20823 - DNA, 80 bp, synthetic construct
  misc_feature 1..80: note = Synthetic: >MK472070_13-cand-1200-1279
  source 1..80: mol_type = other DNA
ttaagaaggttgctgctgcacttacaactgcctataacacttttgtttcaagtgttaagagcgtggtatatattgcaggt

SEQ ID NO: 20824 - DNA, 80 bp, synthetic construct
  misc_feature 1..80: note = Synthetic: >MK472070_13-cand-1280-1359
  source 1..80: mol_type = other DNA
gtcagttttgtacactatgcttttacaacgcctatgattatgcttggcggttgtttgcatgcaattcgccgtgtgactac

SEQ ID NO: 20825 - DNA, 80 bp, synthetic construct
  misc_feature 1..80: note = Synthetic: >MK472070_13-cand-1360-1439
  source 1..80: mol_type = other DNA
tagtgacttgtccatccttgttgaagatggtcttgatgagtttgatgtctttgacgattgtgtggtgcctgtcattccat

SEQ ID NO: 20826 - DNA, 80 bp, synthetic construct
  misc_feature 1..80: note = Synthetic: >MK472070_13-cand-1440-1519
  source 1..80: mol_type = other DNA
cacgtgttgaaacgcgtgttttggaactcgaggaaactgattatgttgaacctcgaggcaatggtttcctcacagtcgtt

SEQ ID NO: 20827 - DNA, 80 bp, synthetic construct
  misc_feature 1..80: note = Synthetic: >MK472070_13-cand-1520-1599
  source 1..80: mol_type = other DNA
aatggttatacattttactcagatggtacatacttttatcctagtaacattgatgcagttgtgccattatgctaccgtaa

SEQ ID NO: 20828 - DNA, 80 bp, synthetic construct
  misc_feature 1..80: note = Synthetic: >MK472070_13-cand-1600-1679
  source 1..80: mol_type = other DNA
ggttggtggtggcaagttgcagttcaatgaggatgttaaagtgtgtgagattagtcctgtgtacaaggtcaagttggact

SEQ ID NO: 20829 - DNA, 80 bp, synthetic construct
  misc_feature 1..80: note = Synthetic: >MK472070_2-cand-30-109
  source 1..80: mol_type = other DNA
ggttttgcggtctcattttgggattgtttttctgtgtagggctatttaacttttcagagacggttgttagcgctagcgac

SEQ ID NO: 20830 - DNA, 80 bp, synthetic construct
  misc_feature 1..80: note = Synthetic: >MK472070_3-cand-0-79
  source 1..80: mol_type = other DNA
ttgtaacagatgcagaagaagttgcgcaagcattgtcttttatagaggaaaagccgtctacttttgttccaaatcctttt

SEQ ID NO: 20831 - DNA, 80 bp, synthetic construct
  misc_feature 1..80: note = Synthetic: >MK472070_3-cand-80-159
  source 1..80: mol_type = other DNA
gcatatgagtttcttgagcttaacggcattaagattcttaagcaggatagtaacaattgttgggtagcatctgcctgtgt

SEQ ID NO: 20832 - DNA, 80 bp, synthetic construct
  misc_feature 1..80: note = Synthetic: >MK472070_3-cand-230-309
  source 1..80: mol_type = other DNA
ttcgttcagcgttgttatgaagtcactggtagtattaagggttcattaggtgatgttgcatactgtatggaacaactcct

SEQ ID NO: 20833 - DNA, 80 bp, synthetic construct
  misc_feature 1..80: note = Synthetic: >MK472070_4-cand-140-219
  source 1..80: mol_type = other DNA
gtaaccagcaaaataacaactcccggagcaattccagaaataattctcgtaacccttctaataacagaggtggtactctc

SEQ ID NO: 20834 - DNA, 80 bp, synthetic construct
  misc_feature 1..80: note = Synthetic: >MK472070_4-cand-250-329
  source 1..80: mol_type = other DNA
tctcgcaacagaggtcagcagaatcagaagaaaaacaataacagtggcaacacatcgcaagatgaccttgttgctgccgt

SEQ ID NO: 20835 - DNA, 80 bp, synthetic construct
  misc_feature 1..80: note = Synthetic: >MK472070_5-cand-160-239
  source 1..80: mol_type = other DNA
gcccccatgagtggtgtggacgatgacgttcatattgagattattgatcaggtttttgacagcacagatgcgtaatcatc

SEQ ID NO: 20836 - DNA, 80 bp, synthetic construct
  misc_feature 1..80: note = Synthetic: >MK472070_5-cand-270-349
  source 1..80: mol_type = other DNA
attactggtatgtcctattgatgattttttcagattgcattcttatgctgcttcatggcattgccacttttactttttgg

SEQ ID NO: 20837 - DNA, 80 bp, synthetic construct
  misc_feature 1..80: note = Synthetic: >MK472070_6-cand-160-239
  source 1..80: mol_type = other DNA
ttttgttacacaggctactttgcttaccgctataaaacacctctgtttattatcttaaacacctcactactggcattcat

SEQ ID NO: 20838 - DNA, 80 bp, synthetic construct
  misc_feature 1..80: note = Synthetic: >MK472070_6-cand-280-359
  source 1..80: mol_type = other DNA
gtgctgtcaggtggtgaacacttcgttaactttggcatacacattgtgccttttgttgtatcgaaggacttgtacgtagc

SEQ ID NO: 20839 - DNA, 80 bp, synthetic construct
  misc_feature 1..80: note = Synthetic: >MK472070_7-cand-0-79
  source 1..80: mol_type = other DNA
cactggcttcttgaagcacaaaatgttgtttttctacacgtttttgttaccaggtgttgttgtcacatctttcactaatt

SEQ ID NO: 20840 - DNA, 80 bp, synthetic construct
  misc_feature 1..80: note = Synthetic: >MK472070_7-cand-290-369
  source 1..80: mol_type = other DNA
atagtgatgtgttgagcttggttatgatgcttatattgaatgtgtcagacagctggtttgttggtgccgctatgtataga

SEQ ID NO: 20841 - DNA, 80 bp, synthetic construct
  misc_feature 1..80: note = Synthetic: >MK472070_8-cand-0-79
  source 1..80: mol_type = other DNA
ttacaggtgtagttcgtctcaatgcaaatatagggacttttggagcccgaccttctaatattagaggttggattctcttt

SEQ ID NO: 20842 - DNA, 80 bp, synthetic construct
  misc_feature 1..80: note = Synthetic: >MK472070_8-cand-50-129
  source 1..80: mol_type = other DNA
ccttctaatattagaggttggattctcttttcaaattgtaactactttttggagagtttcgacatgacttttggccaccg

SEQ ID NO: 20843 - DNA, 80 bp, synthetic construct
  misc_feature 1..80: note = Synthetic: >MK472070_8-cand-150-229
  source 1..80: mol_type = other DNA
tcgatcaatacatgtgtgattctactggtgctcctgctttgcaggagtctgagtgggaatacacagattattttggtgat

SEQ ID NO: 20844 - DNA, 80 bp, synthetic construct
  misc_feature 1..80: note = Synthetic: >MK472070_8-cand-250-329
  source 1..80: mol_type = other DNA
tggaataacttttgttaaagcatggcacgttgaacgtcttgcagtgccataccagaaacagactatcactgctattacaa

SEQ ID NO: 20845 - DNA, 80 bp, synthetic construct
  misc_feature 1..80: note = Synthetic: >MK472070_8-cand-350-429
  source 1..80: mol_type = other DNA
gtacctcacacattgaatgacggtgttacaacagcagttgcacaaccaccaaagcgtagtaagaatgttgtccttgctga

SEQ ID NO: 20846 - DNA, 80 bp, synthetic construct
  misc_feature 1..80: note = Synthetic: >MK472070_8-cand-450-529
  source 1..80: mol_type = other DNA
atcagataggtagtccttttatgactaatggttcaaaactacgtgagtgtattgtgaagcctgtgtttcttcatgctctt

SEQ ID NO: 20847 - DNA, 80 bp, synthetic construct
  misc_feature 1..80: note = Synthetic: >MK472070_9-cand-10-89
  source 1..80: mol_type = other DNA
acagggttgttgtgtttacaaatgagactcttacattttgtcatgtagctagtgcttttgacaaatttgttgatggtgcc

SEQ ID NO: 20848 - DNA, 80 bp, synthetic construct
  misc_feature 1..80: note = Synthetic: >MK472070_9-cand-100-179
  source 1..80: mol_type = other DNA
gcgtcaaagaatttatgaaatctacacctaaggttcctgctggtaatatagtgacctttaagtgtgaagacgttgttact

SEQ ID NO: 20849 - DNA, 80 bp, synthetic construct
  misc_feature 1..80: note = Synthetic: >MK472070_9-cand-190-269
  source 1..80: mol_type = other DNA
ctgttttgccttctgatgatgataagtcatatgacaaaaatttgtcacgcacacttaataagttacaaaagcttaaaggt

SEQ ID NO: 20850 - DNA, 80 bp, synthetic construct
  misc_feature 1..80: note = Synthetic: >MK472070_9-cand-280-359
  source 1..80: mol_type = other DNA
tgactgttcccacacttgaagtttttaagaaacttctcgacacttgtaatgctagtttcatcgttggtgatgacacctca

SEQ ID NO: 20851 - DNA, 80 bp, synthetic construct
  misc_feature 1..80: note = Synthetic: >MK472070_9-cand-370-449
  source 1..80: mol_type = other DNA
catgttttagtgttgagagtactgtaatcaaagttacgtcggatggtcgtgatgtgcaggatgctgtagtttctggtaaa

SEQ ID NO: 20852 - DNA, 80 bp, synthetic construct
  misc_feature 1..80: note = Synthetic: >MK472070_9-cand-460-539
  source 1..80: mol_type = other DNA
atgcacaattgggcccctgtactgctgaaaataaagatctaactggtgtcttgcccaacgatggtattaaaactgttgtt

SEQ ID NO: 20853 - DNA, 80 bp, synthetic construct
  misc_feature 1..80: note = Synthetic: >MK472071_1-cand-40-119
  source 1..80: mol_type = other DNA
cacgcggtgtttgcattgtttgtgctactgttgtggtcaacaatgtttcctatgtcgtgacacagaattacattggtatg

SEQ ID NO: 20854 - DNA, 80 bp, synthetic construct
  misc_feature 1..80: note = Synthetic: >MK472071_2-cand-0-79
  source 1..80: mol_type = other DNA
gaaacacagagcctaagcgtcctgagtttgatttctctttgccgggagcgctcgaaattgtggataactcatcaaggccc

SEQ ID NO: 20855 - DNA, 80 bp, synthetic construct
  misc_feature 1..80: note = Synthetic: >MK472071_2-cand-140-219
  source 1..80: mol_type = other DNA
tcacgaaaccgatctcagagtcgcggaagacagcaaaacaaccagaggcagcaaaatagtaacaccagaaaccctaacca

SEQ ID NO: 20856 - DNA, 80 bp, synthetic construct
  misc_feature 1..80: note = Synthetic: >MK472071_2-cand-210-289
  source 1..80: mol_type = other DNA
accctaaccagggtcgcagccagggcaatcagtctcgcggtagatccaattcaaggaaccgtgacactggcaggagcaca

SEQ ID NO: 20857 - DNA, 80 bp, synthetic construct
  misc_feature 1..80: note = Synthetic: >MK472071_3-cand-150-229
  source 1..80: mol_type = other DNA
gtcattttgatggctttttgcaacctggcttgggacatctacgtttatgaaattctttcaaaagttgtgggataccagac

SEQ ID NO: 20858 - DNA, 80 bp, synthetic construct
  misc_feature 1..80: note = Synthetic: >MK472071_3-cand-270-349
  source 1..80: mol_type = other DNA
acaatttgttgctttgtctgtgcactacatgtgtaccgtttcaacccttcaaacacaagctctgttgtcacttttgctat

SEQ ID NO: 20859 - DNA, 80 bp, synthetic construct
  misc_feature 1..80: note = Synthetic: >MK472071_3-cand-390-469
  source 1..80: mol_type = other DNA
gactatctgtctgttggtgtcatgtgcctgctaaatatgtcaagcacttggtatgtaggatttgttgcttacaaggtagc

SEQ ID NO: 20860 - DNA, 80 bp, synthetic construct
  misc_feature 1..80: note = Synthetic: >MK472071_4-cand-120-199
  source 1..80: mol_type = other DNA
tgctgcaacaaatcagacaacaccactaccacaaagactctccagaagtgcttcacttcagcaccttaatgatgaaggtg

SEQ ID NO: 20861 - DNA, 80 bp, synthetic construct
  misc_feature 1..80: note = Synthetic: >MK472071_4-cand-220-299
  source 1..80: mol_type = other DNA
gatgatgtaattgatgatgagacttctgcttaatcaactaaacatgcttaaaacccttttcaaggtttttgctcttctgc

SEQ ID NO: 20862 - DNA, 80 bp, synthetic construct
  misc_feature 1..80: note = Synthetic: >MK472071_4-cand-320-399
  source 1..80: mol_type = other DNA
tgtgctttgccaatcactaaaaagaaggttgatttgcttgctgaaacccattgtaatcaatacggacctggacatcctgg

SEQ ID NO: 20863 - DNA, 80 bp, synthetic construct
  misc_feature 1..80: note = Synthetic: >MK472071_4-cand-420-499
  source 1..80: mol_type = other DNA
gggatgccattgattcaacaaaaggtgtgtatcttaatttggtacgcatcactgaaactcctcttggagacatcatcaca

SEQ ID NO: 20864 - DNA, 80 bp, synthetic construct
  misc_feature 1..80: note = Synthetic: >MK472071_4-cand-520-599
  source 1..80: mol_type = other DNA
tcatggtaatatctatgacttcagtaagacgacaactgccttgaatgactgtgatgctaaaactaaaaattgctgagtaa

SEQ ID NO: 20865 - DNA, 80 bp, synthetic construct
  misc_feature 1..80: note = Synthetic: >MK472071_5-cand-100-179
  source 1..80: mol_type = other DNA
tttgggtgttaattatctccttagcggcatttttgtttactacttcgccacttttaagtgtagtagctttcgtagtaact

SEQ ID NO: 20866 - DNA, 80 bp, synthetic construct
  misc_feature 1..80: note = Synthetic: >MK472071_5-cand-190-269
  source 1..80: mol_type = other DNA
catccttagatttatcactttgtttgtctatgtacccttactgttgtatgttggagcatacatagacggtgccataattg

SEQ ID NO: 20867 - DNA, 80 bp, synthetic construct
  misc_feature 1..80: note = Synthetic: >MK472071_5-cand-280-359
  source 1..80: mol_type = other DNA
attttcaagaatctgctacctccttgtgcaatgcgcgttgtggcgtagcccatattaccttatccttaatagtgccaatt

SEQ ID NO: 20868 - DNA, 80 bp, synthetic construct
  misc_feature 1..80: note = Synthetic: >MK472071_5-cand-370-449
  source 1..80: mol_type = other DNA
tttaggtaaatgttggtacgtggaccttgacatgtatgtctgtctcagaggaggcgattcatacgttaaatttggtccac

SEQ ID NO: 20869 - DNA, 80 bp, synthetic construct
  misc_feature 1..80: note = Synthetic: >MK472071_5-cand-460-539
  source 1..80: mol_type = other DNA
ctttatacgcactgataacttgtttatctctgtgcgtggaagaaaaacattaactgctcatctcgttcgtcgagttgaat

SEQ ID NO: 20870 - DNA, 80 bp, synthetic construct
  misc_feature 1..80: note = Synthetic: >MK472071_5-cand-550-629
  source 1..80: mol_type = other DNA
tgacttcctatacatttttgacacactaccgttagttagtgtagtcaatacaataccacccagtctcaactaaacggaaa

SEQ ID NO: 20871 - DNA, 80 bp, synthetic construct
  misc_feature 1..80: note = Synthetic: >MK472071_5-cand-640-719
  source 1..80: mol_type = other DNA
tctagttagtcaggatagtttcctaattaatgctttcctctgggtgtttctattaatctttgtattattgctttgtatta

SEQ ID NO: 20872 - DNA, 80 bp, synthetic construct
  misc_feature 1..80: note = Synthetic: >MK472071_5-cand-730-809
  source 1..80: mol_type = other DNA
actggttcaaatgtgtctcatctgccatcatatgatgacaggtgccatttacaaaccagtttatagagtataccaagttt

SEQ ID NO: 20873 - DNA, 80 bp, synthetic construct
  misc_feature 1..80: note = Synthetic: >MK472071_6-cand-0-79
  source 1..80: mol_type = other DNA
cttaggtgcaccagctctgccattttctcttgcagtcttttctaagcttaattaccttgctttgcaaacagactttattc

SEQ ID NO: 20874 - DNA, 80 bp, synthetic construct
  misc_feature 1..80: note = Synthetic: >MK472071_6-cand-90-169
  source 1..80: mol_type = other DNA
aaagcacattgccaatgcttttaacaatgccatgggtaatattacagctgctttcaccaatgtggatcaggcgttgcagc

SEQ ID NO: 20875 - DNA, 80 bp, synthetic construct
  misc_feature 1..80: note = Synthetic: >MK472071_6-cand-180-259
  source 1..80: mol_type = other DNA
tgctattaaaactgttgctgatgccctcaacaaggtgcaaagtgctgtcaacacgcagggacaagcgcttgagaagttga

SEQ ID NO: 20876 - DNA, 80 bp, synthetic construct
  misc_feature 1..80: note = Synthetic: >MK472071_6-cand-270-349
  source 1..80: mol_type = other DNA
ggctatcaacttcgatgctatctctgcttctatagaagacatctataataggcttgacgaacttgctgcagatgcccaag

SEQ ID NO: 20877 - DNA, 80 bp, synthetic construct
  misc_feature 1..80: note = Synthetic: >MK472071_6-cand-360-439
  source 1..80: mol_type = other DNA
tattaatggtcgtcttgcggctctgtctacgttcgtttcctcacagttagttcagtactcggaagttagagcctctcgta

SEQ ID NO: 20878 - DNA, 80 bp, synthetic construct
  misc_feature 1..80: note = Synthetic: >MK472071_6-cand-450-529
  source 1..80: mol_type = other DNA
tcagaaagtcaatgagtgtgtgagatctcaaagtaaccgactgggtttctgcggcaatgggacacacttgttctcactag

SEQ ID NO: 20879 - DNA, 80 bp, synthetic construct
  misc_feature 1..80: note = Synthetic: >MK472071_6-cand-540-619
  source 1..80: mol_type = other DNA
accagaaggactaatgttctttcacactgttttgcttcctactgagtttcgtgaggtccaagcatgggcaggtttgtgca

SEQ ID NO: 20880 - DNA, 80 bp, synthetic construct
  misc_feature 1..80: note = Synthetic: >MK472071_6-cand-750-829
  source 1..80: mol_type = other DNA
atcttgtgccataacttatctcaatcttactagtgatgagtttggtgctattgtgcctgattatatagatgtcaacaaga

SEQ ID NO: 20881 - DNA, 80 bp, synthetic construct
  misc_feature 1..80: note = Synthetic: >MK472071_7-cand-0-79
  source 1..80: mol_type = other DNA
gtatggtgacaaagttgagtctctgcttgacgatgatgtcgtttgcatggtacttggctctggacaccagttgaaattgg

SEQ ID NO: 20882 - DNA, 80 bp, synthetic construct
  misc_feature 1..80: note = Synthetic: >MK472071_7-cand-80-159
  source 1..80: mol_type = other DNA
ggtctttttctgagagacctgatggccttgtaggctggcttgtcttctctgtttgtcctactgacggcactacttttgtt

SEQ ID NO: 20883 - DNA, 80 bp, synthetic construct
  misc_feature 1..80: note = Synthetic: >MK472071_7-cand-160-239
  source 1..80: mol_type = other DNA
aaccttaatggttctgctggtagtgccgttcatgtggacaattacctctgtgatcatactggcaggcctgttctccctga

SEQ ID NO: 20884 - DNA, 80 bp, synthetic construct
  misc_feature 1..80: note = Synthetic: >MK472071_7-cand-240-319
  source 1..80: mol_type = other DNA
ggatgtgtgggtgtgccaggattactttggtgaagaagacactattgttgtcaatggtgtcatttatgttaaggcttgga

SEQ ID NO: 20885 - DNA, 80 bp, synthetic construct
  misc_feature 1..80: note = Synthetic: >MK472071_7-cand-320-399
  source 1..80: mol_type = other DNA
acgtcactcgtgacgctttgccttacaaacaacaaactgtcaccgccattacttccattgactggctgaaagaagcgaac

SEQ ID NO: 20886 - DNA, 80 bp, synthetic construct
  misc_feature 1..80: note = Synthetic: >MK472071_7-cand-400-479
  source 1..80: mol_type = other DNA
catgtgctacctagtggcactgttcgtacttcagccaagaatgtgaccaggagtaaggtggttgtacatgctgagcctct

SEQ ID NO: 20887 - DNA, 80 bp, synthetic construct
  misc_feature 1..80: note = Synthetic: >MK472071_7-cand-480-559
  source 1..80: mol_type = other DNA
cgccagtatttatgctggcattggcagcccgtttatgaccaatggcaccacaatccttgaagctgtccccaaaccttgct

SEQ ID NO: 20888 - DNA, 80 bp, synthetic construct
  misc_feature 1..80: note = Synthetic: >MK472071_7-cand-560-639
  source 1..80: mol_type = other DNA
ttttgcatgcttatgtaatttgcaagtgtggcagcagacattgggttgtgggtgattggcatatgggttacaagtctttg

SEQ ID NO: 20889 - DNA, 80 bp, synthetic construct
  misc_feature 1..80: note = Synthetic: >MK472071_7-cand-640-719
  source 1..80: mol_type = other DNA
tgttgtggcacaaagtgcacaccaatttgccattccgcgggctatgtggaaccaggagatgtcattttaacatctgttgg

SEQ ID NO: 20890 - DNA, 80 bp, synthetic construct
  misc_feature 1..80: note = Synthetic: >MK472071_7-cand-720-799
  source 1..80: mol_type = other DNA
ggctggcaagggtactaagttctacaaaggacttacccttaaatatgttggtgatgctgacaaggtttcaatctggcgtg

SEQ ID NO: 20891 - DNA, 80 bp, synthetic construct
  misc_feature 1..80: note = Synthetic: >MK472071_7-cand-800-879
  source 1..80: mol_type = other DNA
ttaccactacatttgatgtttgtggtttcgtcagttgcagccgcttcaatgatgactatgttgcaatccttgatgactgt

SEQ ID NO: 20892 - DNA, 80 bp, synthetic construct
  misc_feature 1..80: note = Synthetic: >MK472071_7-cand-880-959
  source 1..80: mol_type = other DNA
ggcgtcgaaaacacgactcaattggcatgcgcactcaagtatggaatactgagtggcgagtacaatgagcgtgttgttga

SEQ ID NO: 20893 - DNA, 80 bp, synthetic construct
  misc_feature 1..80: note = Synthetic: >MK472071_7-cand-960-1039
  source 1..80: mol_type = other DNA
cgctgtcaagcaaggtcttatcaacatgagtctctcttttcttgatgtcctggatgacattctaccagtacctaagtttc

SEQ ID NO: 20894 - DNA, 80 bp, synthetic construct
  misc_feature 1..80: note = Synthetic: >MK472071_7-cand-1040-1119
  source 1..80: mol_type = other DNA
ttcagagacttggtgatattggtgttagtgtctgggacaatttcaagaagttcgtgcgtgctagtgttgatagcactgca

SEQ ID NO: 20895 - DNA, 80 bp, synthetic construct
  misc_feature 1..80: note = Synthetic: >MK472071_7-cand-1120-1199
  source 1..80: mol_type = other DNA
cttctcaaggacattgctaatgctgttgccaatgctacacttgttgttgctaatggtgctttccagcttttgctgaatgt

SEQ ID NO: 20896 - DNA, 80 bp, synthetic construct
  misc_feature 1..80: note = Synthetic: >MK472071_7-cand-1200-1279
  source 1..80: mol_type = other DNA
tcctgatgccatcaagtctatcattgagaagctccagcagctcatcagttctatcagcgagttctttgttgatgaattgc

SEQ ID NO: 20897 - DNA, 80 bp, synthetic construct
  misc_feature 1..80: note = Synthetic: >MK472071_7-cand-1290-1369
  source 1..80: mol_type = other DNA
tgttgcctttggtaggtttggtgactacgtactctttgacaatgcgctttgcaagttggcgagcgcgaaaatcaagggtg

SEQ ID NO: 20898 - DNA, 80 bp, synthetic construct
  misc_feature 1..80: note = Synthetic: >MK472071_7-cand-1370-1449
  source 1..80: mol_type = other DNA
caaaacaagctggccttaaaaatgctacatatgctagcattgtttgtggcccagtgaagaaggttaaagtctctcgtgtc

SEQ ID NO: 20899 - DNA, 80 bp, synthetic construct
  misc_feature 1..80: note = Synthetic: >MK472071_7-cand-1450-1529
  source 1..80: mol_type = other DNA
gaagctatgaatcttagcttgactcttgcagaggactctacaccttgtcaaaatggccgtgcagtcgttgtaggcggcca

SEQ ID NO: 20900 - DNA, 80 bp, synthetic construct
  misc_feature 1..80: note = Synthetic: >MK472071_7-cand-1610-1689
  source 1..80: mol_type = other DNA
tcattccgaatgaaactaacacaccaacactcgataaaagtggtggtggtgtgtctttcagtgacactccagaagtccgt

SEQ ID NO: 20901 - DNA, 80 bp, synthetic construct
  misc_feature 1..80: note = Synthetic: >MK472071_7-cand-1690-1769
  source 1..80: mol_type = other DNA
gaggttgcacccgttcataaagtttatgtgtcctttgagtttgaggatgatgttatcacatctgtcctcaaaaaggtcgt

SEQ ID NO: 20902 - DNA, 80 bp, synthetic construct
  misc_feature 1..80: note = Synthetic: >MK472071_7-cand-1780-1859
  source 1..80: mol_type = other DNA
ttcacttttgagggtaattcatggtctgacatgttgactgtcgtggaaggttttatgggtgctgttgcttctcaattacc

SEQ ID NO: 20903 - DNA, 80 bp, synthetic construct
  misc_feature 1..80: note = Synthetic: >MK472071_7-cand-1870-1949
  source 1..80: mol_type = other DNA
tactatgtgtatgatgaagagggtggcgaagacttcacagctcctattatggtatcgcagtggccgcttgcaaatgttgc

SEQ ID NO: 20904 - DNA, 80 bp, synthetic construct
  misc_feature 1..80: note = Synthetic: >MK472071_7-cand-1950-2029
  source 1..80: mol_type = other DNA
cactgtacttcctctatgtagtgccactatttgtgagttggcaccgcttgtagaggaagaaattgttgagtttgatgtga

SEQ ID NO: 20905 - DNA, 80 bp, synthetic construct
  misc_feature 1..80: note = Synthetic: >MK472071_7-cand-2030-2109
  source 1..80: mol_type = other DNA
agcaggttaagttgtccattaagacggctggtaagcctgcattgcacaaagctcgtgttacatccattgaggttcttcaa

SEQ ID NO: 20906 - DNA, 80 bp, synthetic construct
  misc_feature 1..80: note = Synthetic: >MK472071_8-cand-0-79
  source 1..80: mol_type = other DNA
ttttcactatcatctgtttgttagccttcttaggttgttgcaattgtaattgcaacactcctacagtgggcatgaaaata

SEQ ID NO: 20907 - DNA, 80 bp, synthetic construct
  misc_feature 1..80: note = Synthetic: >MK472071_8-cand-80-159
  source 1..80: mol_type = other DNA
cagctaggcctgcccgtttccactactgcttatgtgtccggctatctacctgtgcccaataattggacttgtgtagctgg

SEQ ID NO: 20908 - DNA, 80 bp, synthetic construct
  misc_feature 1..80: note = Synthetic: >MK472071_8-cand-160-239
  source 1..80: mol_type = other DNA
caccctttctaaacttgtgggtaaagctcgtggtgtgtttttgcgttatgtgcatagtgcccggggtatgtcttttggtg

SEQ ID NO: 20909 - DNA, 80 bp, synthetic construct
  misc_feature 1..80: note = Synthetic: >MK472071_8-cand-240-319
  source 1..80: mol_type = other DNA
tcggttctcacgacaatgcaggcctccagggagattatcctctttattcgttatttgtgtggcagcgtaatggtcactcc

SEQ ID NO: 20910 - DNA, 80 bp, synthetic construct
  misc_feature 1..80: note = Synthetic: >MK472071_8-cand-320-399
  source 1..80: mol_type = other DNA
ttgattgtacgaatctgtcgttggtggcttaacaaagacttgtcacacaataaaccgggccctacatcttctggtgcatg

SEQ ID NO: 20911 - DNA, 80 bp, synthetic construct
  misc_feature 1..80: note = Synthetic: >MK472071_8-cand-400-479
  source 1..80: mol_type = other DNA
tcttcttaacaaggagtttcccaatcttaactttgtgcatgatggttaccaagttgttggcgtgtcttggactggtgaca

SEQ ID NO: 20912 - DNA, 80 bp, synthetic construct
  misc_feature 1..80: note = Synthetic: >MK472071_8-cand-480-559
  source 1..80: mol_type = other DNA
cagtcaccgtgcatggacgctatgaggtttataacctgattgttcctggcgccgctttgtgggacacagcagtttttgct

SEQ ID NO: 20913 - DNA, 80 bp, synthetic construct
  misc_feature 1..80: note = Synthetic: >MK472071_8-cand-560-639
  source 1..80: mol_type = other DNA
tgtgaacacaaagactcatgtggacatcagcttatctctgacatgataaccatcaatgccactacaaatcaagttggtac

SEQ ID NO: 20914 - DNA, 80 bp, synthetic construct
  misc_feature 1..80: note = Synthetic: >MK472071_8-cand-640-719
  source 1..80: mol_type = other DNA
cattactaattacagtttgtgtaacacttgtaatggatttccccaacacgtctttgctgttgcagatggcggaaagatac

SEQ ID NO: 20915 - DNA, 80 bp, synthetic construct
  misc_feature 1..80: note = Synthetic: >MK472071_8-cand-720-799
  source 1..80: mol_type = other DNA
ctcccacgtttgactttactaattggttttttctaaccaatagtacgtcaccaatacaagggcgtgttgtttcccgtcag

SEQ ID NO: 20916 - DNA, 80 bp, synthetic construct
  misc_feature 1..80: note = Synthetic: >MK472071_8-cand-800-879
  source 1..80: mol_type = other DNA
ccattgcacttgcaatgtttgtggcctataccagcactaagttctgatacaggtgtcatatactttaaccaatcacgcaa

SEQ ID NO: 20917 - DNA, 80 bp, synthetic construct
  misc_feature 1..80: note = Synthetic: >MK472071_8-cand-880-959
  source 1..80: mol_type = other DNA
tgtaggcactcgttgtaatggcttttccaacaacagtgtcttttctgaccatttgaggtttgcacttaatacaacaagca

SEQ ID NO: 20918 - DNA, 80 bp, synthetic construct
  misc_feature 1..80: note = Synthetic: >MK472071_8-cand-960-1039
  source 1..80: mol_type = other DNA
gcggttctgtgttgtttggcagtctatcattttttagtggtaccactgtctacaactttacttgcagcaactccactacc

SEQ ID NO: 20919 - DNA, 80 bp, synthetic construct
  misc_feature 1..80: note = Synthetic: >MK472071_8-cand-1040-1119
  source 1..80: mol_type = other DNA
aacttcacaaaagctggtattccctttggtgtcacagacaaaccttattattgttttgtgacacaagggtttgatgtcgc

SEQ ID NO: 20920 - DNA, 80 bp, synthetic construct
  misc_feature 1..80: note = Synthetic: >MK472071_8-cand-1120-1199
  source 1..80: mol_type = other DNA
tgctaaccgcacttttgcaggtatcatgccaatagacctccgtgaaatagttgtttcacgttggggttccatctatttga

SEQ ID NO: 20921 - DNA, 80 bp, synthetic construct
  misc_feature 1..80: note = Synthetic: >MK472071_8-cand-1200-1279
  source 1..80: mol_type = other DNA
atggtttcaagctttttagcttgccatacatagacggtgtgatttttaacttcactagtttcacaggttccgacttttgg

SEQ ID NO: 20922 - DNA, 80 bp, synthetic construct
  misc_feature 1..80: note = Synthetic: >MK472071_8-cand-1280-1359
  source 1..80: mol_type = other DNA
actgttgcctattctagtgaggtcgaagtgctgctggacctccaaaatacgtatatgaccaatattctttactgtgactc

SEQ ID NO: 20923 - DNA, 80 bp, synthetic construct
  misc_feature 1..80: note = Synthetic: >MK472071_8-cand-1360-1439
  source 1..80: mol_type = other DNA
tccacttaataggttgaagtgtcagcagaagaagttctacttggaagatggtttctactcttccactgagcttgaagaac

SEQ ID NO: 20924 - DNA, 80 bp, synthetic construct
  misc_feature 1..80: note = Synthetic: >MK472071_8-cand-1440-1519
  source 1..80: mol_type = other DNA
cggttgttaatagtgttgtgttacttcctgagtattccggttacacaaatgtaacagtgctcgttgaagctaattacaca

SEQ ID NO: 20925 - DNA, 80 bp, synthetic construct
  misc_feature 1..80: note = Synthetic: >MK472071_8-cand-1520-1599
  source 1..80: mol_type = other DNA
caagaactgacactcgactgtgaacctaagtatggtgagaaaaggatcacccttgttaactccaaaggtgaacaatatcc

SEQ ID NO: 20926 - DNA, 80 bp, synthetic construct
  misc_feature 1..80: note = Synthetic: >MK472071_8-cand-1600-1679
  source 1..80: mol_type = other DNA
taacaacactgtctgtgttaacacaaacagagtttctctgaattttgtgtatcaactgagccatcgcataacatgcgaca

SEQ ID NO: 20927 - DNA, 80 bp, synthetic construct
  misc_feature 1..80: note = Synthetic: >MK472071_8-cand-1680-1759
  source 1..80: mol_type = other DNA
tctctgctcgaacagacaagtgttcattctcaccctctcagttcaataactaccttaaatttggcagtctatgtttctct

SEQ ID NO: 20928 - DNA, 80 bp, synthetic construct
  misc_feature 1..80: note = Synthetic: >MK472071_8-cand-1760-1839
  source 1..80: mol_type = other DNA
ttgcatgataatggtggttgtgaagttcctatcactagttattcctatcagtttcaaactgtgaggaatttcggtgctac

SEQ ID NO: 20929 - DNA, 80 bp, synthetic construct
  misc_feature 1..80: note = Synthetic: >MK472071_8-cand-1840-1919
  source 1..80: mol_type = other DNA
tctttatgtgctatcctcaccgggtgactccataacgagtgtaccaccttctttttctgataggcttggcttccttgatt

SEQ ID NO: 20930 - DNA, 80 bp, synthetic construct
  misc_feature 1..80: note = Synthetic: >MK472071_8-cand-1920-1999
  source 1..80: mol_type = other DNA
ccagcgttttgcacctaaatgtttgtactagttacaacatttatggcatagcgggcaagggtgtcatagttgaatctaat

SEQ ID NO: 20931 - DNA, 80 bp, synthetic construct
  misc_feature 1..80: note = Synthetic: >MK472071_8-cand-2000-2079
  source 1..80: mol_type = other DNA
gctacgtaccatactggcatctattatacggatgcaagtggtgctttagctagcttcaaaaataccacaacaggccaagt

SEQ ID NO: 20932 - DNA, 80 bp, synthetic construct
  misc_feature 1..80: note = Synthetic: >MK472071_8-cand-2080-2159
  source 1..80: mol_type = other DNA
ttatgaagtcagaccatgtcaaactcctaagcagtatgccgtagtcaacgatgccattgttggtgtaattgctgcatcac

SEQ ID NO: 20933 - DNA, 80 bp, synthetic construct
  misc_feature 1..80: note = Synthetic: >MK472071_8-cand-2160-2239
  source 1..80: mol_type = other DNA
ctgcacagatacctggtcttgatttcaatcatacaagggccacacccatgttttattacttgtcaaatagtcctcttaat

SEQ ID NO: 20934 - DNA, 80 bp, synthetic construct
  misc_feature 1..80: note = Synthetic: >MK472071_8-cand-2240-2319
  source 1..80: mol_type = other DNA
tgttcgaacccttctctcacatatgccactatgggtatatgtgctgatggttctattggcgaagtgcaaccacgtacagt

SEQ ID NO: 20935 - DNA, 80 bp, synthetic construct
  misc_feature 1..80: note = Synthetic: >MK472071_8-cand-2320-2399
  source 1..80: mol_type = other DNA
ctcaacaccacctatgtcacctattattacaggcaatgtaactgtaccagtaaattttactgtttcagtacaagctgagt

SEQ ID NO: 20936 - DNA, 80 bp, synthetic construct
  misc_feature 1..80: note = Synthetic: >MK472071_8-cand-2400-2479
  source 1..80: mol_type = other DNA
atgtacaagtctcccttcgctctgtcgttgttgactgtgctacttatgtctgtaatggtaatgttaggtgtttacaattg

SEQ ID NO: 20937 - DNA, 80 bp, synthetic construct
  misc_feature 1..80: note = Synthetic: >MK472071_8-cand-2480-2559
  source 1..80: mol_type = other DNA
ttgcgtcagtacgttactgcgtgcacttcagttgaaaatgcgctagccctcaatgccagattggagagtcaagaagttgc

SEQ ID NO: 20938 - DNA, 80 bp, synthetic construct
  misc_feature 1..80: note = Synthetic: >MK472071_9-cand-0-79
  source 1..80: mol_type = other DNA
catgcaccataacttgtgacgcttcttgtgattgcggtgattcagattacgttatggagggttgtgtttttaggcttttg

SEQ ID NO: 20939 - DNA, 80 bp, synthetic construct
  misc_feature 1..80: note = Synthetic: >MK472071_9-cand-80-159
  source 1..80: mol_type = other DNA
cctaatgatgacccctttgaacgttactgtcctaagtgtggcattaataggttttgtactattaaagccattaagggcac

SEQ ID NO: 20940 - DNA, 80 bp, synthetic construct
  misc_feature 1..80: note = Synthetic: >MK472071_9-cand-160-239
  source 1..80: mol_type = other DNA
ggcaatcttttgtcaaaaccctggtccattgcctcgtatgcatgtcgaaccgtatgtatctagtgctttcttgggtagta

SEQ ID NO: 20941 - DNA, 80 bp, synthetic construct
  misc_feature 1..80: note = Synthetic: >MK472071_9-cand-240-319
  source 1..80: mol_type = other DNA
ttggtagtggtcattaccaaaccaatgtctactccttgaatcaggctattgatggctacggtacacatcctctttttaat

SEQ ID NO: 20942 - DNA, 80 bp, synthetic construct
  misc_feature 1..80: note = Synthetic: >MK472071_9-cand-320-399
  source 1..80: mol_type = other DNA
aagagtgtgcatacgattggtgtgaaggacgtagattgggttgtcaagagaacagaagttcccactactagtgttgcaac

SEQ ID NO: 20943 - DNA, 80 bp, synthetic construct
  misc_feature 1..80: note = Synthetic: >MK472071_9-cand-400-479
  source 1..80: mol_type = other DNA
cacacattgcaaacctttcttgacttacaagaatgttagtttttatagaggggatgttcgtgatctcgttagcattccac

SEQ ID NO: 20944 - DNA, 80 bp, synthetic construct
  misc_feature 1..80: note = Synthetic: >MK472071_9-cand-480-559
  source 1..80: mol_type = other DNA
atgatttcattgtgaatgctgctaacgaaaacctgcaacatggcggtggtgtggctaaggccatagacctttgcactggt

SEQ ID NO: 20945 - DNA, 80 bp, synthetic construct
  misc_feature 1..80: note = Synthetic: >MK472071_9-cand-570-649
  source 1..80: mol_type = other DNA
aatctgagtctgacaagtacataaaagcctgtggtcctcttaagaagggtcaaggcgttatgctcgtttgtgacaatgtt

SEQ ID NO: 20946 - DNA, 80 bp, synthetic construct
  misc_feature 1..80: note = Synthetic: >MK472071_9-cand-650-729
  source 1..80: mol_type = other DNA
aaagtttttaacgttgttggtcctcgtaagactaagaagtccaccgttgtgtcttgtaaaagtgtgctttatgaggctta

SEQ ID NO: 20947 - DNA, 80 bp, synthetic construct
  misc_feature 1..80: note = Synthetic: >MK472071_9-cand-740-819
  source 1..80: mol_type = other DNA
tttgctaacactggcaccccccttacacctcttctaagtgtgggcatcttcggcgttcctttggatgcgtcattggatgt

SEQ ID NO: 20948 - DNA, 80 bp, synthetic construct
  misc_feature 1..80: note = Synthetic: >MK472071_9-cand-820-899
  source 1..80: mol_type = other DNA
ctttttggatgttgttggtgataaagcttgccactgcttttgctatacggctgaagaggttgatggcattaagaaatttg

SEQ ID NO: 20949 - DNA, 80 bp, synthetic construct
  misc_feature 1..80: note = Synthetic: >MK472071_9-cand-900-979
  source 1..80: mol_type = other DNA
tcaattctctcacagagactagtgctcagtgtgagaaaatacctgttcagcaaaaactggcaaagactgaaatgcttgct

SEQ ID NO: 20950 - DNA, 80 bp, synthetic construct
  misc_feature 1..80: note = Synthetic: >MK472071_9-cand-980-1059
  source 1..80: mol_type = other DNA
acaccagcactggaatctgtaacaccactaaaggttaaacttgtgagtgttaaagctagctgcagtgttgaaccaggtac

SEQ ID NO: 20951 - DNA, 80 bp, synthetic construct
  misc_feature 1..80: note = Synthetic: >MK472071_9-cand-1060-1139
  source 1..80: mol_type = other DNA
atttgtaaaagcaaccattacggtacctcgtttgttggttgctgctaatgtacaagttcagcacgctaagctagaaacag

SEQ ID NO: 20952 - DNA, 80 bp, synthetic construct
  misc_feature 1..80: note = Synthetic: >MK472071_9-cand-1140-1219
  source 1..80: mol_type = other DNA
tgagtgcctccaaattagagagtacttcacccttaaagtttaagtctttaagtgtcaatgctgcctatggtgttgcacca

SEQ ID NO: 20953 - DNA, 80 bp, synthetic construct
  misc_feature 1..80: note = Synthetic: >MK472071_9-cand-1230-1309
  source 1..80: mol_type = other DNA
gtgaaagtgctactgttgtgcttcaccgtgtgttgccagcaccttgcagagtagagggcgatgtgcaattttatgattgc

SEQ ID NO: 20954 - DNA, 80 bp, synthetic construct
  misc_feature 1..80: note = Synthetic: >MK472071_9-cand-1320-1399
  source 1..80: mol_type = other DNA
atctcgtgaagcagcagtttgaacgctatgttttctttattaaagaagacaaagttaagtgcgcactcatgacggacttt

SEQ ID NO: 20955 - DNA, 80 bp, synthetic construct
  misc_feature 1..80: note = Synthetic: >MK472071_9-cand-1400-1479
  source 1..80: mol_type = other DNA
gatgtcttggtgggtggtgcacttacagatgcgttgcaacaatgtgggcctttacctgcaggtaatgccttgacagtaaa

SEQ ID NO: 20956 - DNA, 80 bp, synthetic construct
  misc_feature 1..80: note = Synthetic: >MK472071_9-cand-1480-1559
  source 1..80: mol_type = other DNA
ggtagaaggcgattgtacactcacatgcactattatagttttgcccactgatggtgctaaaaactatgataagaattgtc

SEQ ID NO: 20957 - DNA, 80 bp, synthetic construct
  misc_feature 1..80: note = Synthetic: >MK472071_9-cand-1560-1639
  source 1..80: mol_type = other DNA
agcgagtggtcaacaagttttgtaagtttacaaactttgttgcgacagtaccacctagtagtgtcttcacaaagatctgt

SEQ ID NO: 20958 - DNA, 80 bp, synthetic construct
  misc_feature 1..80: note = Synthetic: >MK472071_9-cand-1640-1719
  source 1..80: mol_type = other DNA
ttaaaagctagggctttttggatgaatgtggacacttgtggtgttgtccatcgtcattatgtcaaacaacctattactac

SEQ ID NO: 20959 - DNA, 80 bp, synthetic construct
  misc_feature 1..80: note = Synthetic: >MK472071_9-cand-1720-1799
  source 1..80: mol_type = other DNA
gttagtcacaaagaactctcgtgactttaaacaggttgtcttagactcaaaacaaacctatgaagaacagcttggcgtct

SEQ ID NO: 20960 - DNA, 80 bp, synthetic construct
  misc_feature 1..80: note = Synthetic: >MK472071_9-cand-1800-1879
  source 1..80: mol_type = other DNA
gtactgtgaacaatgtggatgttacatccaaaaatgtcacagcactagaagacgtagtggctgttgcaccacaggttgac

SEQ ID NO: 20961 - DNA, 80 bp, synthetic construct
  misc_feature 1..80: note = Synthetic: >MK472071_9-cand-1880-1959
  source 1..80: mol_type = other DNA
tgggatgcctattatgggttcccagatgctgctgcttttgaaactatggaccacacctcctttgagtacgaaagctcttt

SEQ ID NO: 20962 - DNA, 80 bp, synthetic construct
  misc_feature 1..80: note = Synthetic: >MK472071_9-cand-1960-2039
  source 1..80: mol_type = other DNA
ggttaatggtgttcggctccttaaaagtactgataacaattgttgggtaaatgctacctgtgtacaattgcaatacatga

SEQ ID NO: 20963 - DNA, 80 bp, synthetic construct
  misc_feature 1..80: note = Synthetic: >MK472071_9-cand-2040-2119
  source 1..80: mol_type = other DNA
gtgcaaaatttgttagcgacggtttgaacgccatgtgggatgactatatggtgggaaaagtcgccaaatttgttcattgg

SEQ ID NO: 20964 - DNA, 80 bp, synthetic construct
  misc_feature 1..80: note = Synthetic: >MK472071_9-cand-2120-2199
  source 1..80: mol_type = other DNA
ttgtacattcttgctggcttaaataagtctgacaagaatgatgccgaaacacttatgttgaaaatttcaaaataccttgt

SEQ ID NO: 20965 - DNA, 80 bp, synthetic construct
  misc_feature 1..80: note = Synthetic: >MK472071_9-cand-2200-2279
  source 1..80: mol_type = other DNA
ttccaatactacttttgtagttgagaaacaaactgagactggttgctgtgatgaacgtcatctactaaagtgcaccgtcc

SEQ ID NO: 20966 - DNA, 80 bp, synthetic construct
  misc_feature 1..80: note = Synthetic: >MK472071_9-cand-2280-2359
  source 1..80: mol_type = other DNA
tgaatgctagcgtgttcagaaatggtgatgtagatggcgtctgtaagcatggtcttaacttgtataagaaagttgtctcc

SEQ ID NO: 20967 - DNA, 80 bp, synthetic construct
  misc_feature 1..80: note = Synthetic: >MK472071_9-cand-2360-2439
  source 1..80: mol_type = other DNA
gttgaaggtacaggtgtaattgttaatcctaacaagcccacacctgttcctaagaatgtgttacttgatggtgtgtcata

SEQ ID NO: 20968 - DNA, 80 bp, synthetic construct
  misc_feature 1..80: note = Synthetic: >MK472071_9-cand-2440-2519
  source 1..80: mol_type = other DNA
cacagcctttgtaggtgacatcggtaatggtcactatgtggttgtagataagaaatctgagacatcctatgatggtgatg

SEQ ID NO: 20969 - DNA, 80 bp, synthetic construct
  misc_feature 1..80: note = Synthetic: >MK472071_9-cand-2520-2599
  source 1..80: mol_type = other DNA
aggttaaaccagcccttctgtcatcagtgggtgttactgccgttgttgttaagtcttgtaagtttaaggttcctaaaaag

SEQ ID NO: 20970 - DNA, 80 bp, synthetic construct
  misc_feature 1..80: note = Synthetic: >MK472071_9-cand-2600-2679
  source 1..80: mol_type = other DNA
gtggctaaagcacctgaaaaacctaagactgacacgttgaacacaacagctgtcactgtagccactacattctttagtgt

SEQ ID NO: 20971 - DNA, 80 bp, synthetic construct
  misc_feature 1..80: note = Synthetic: >MK472071_9-cand-2680-2759
  source 1..80: mol_type = other DNA
tggcgactttctttttagaaatctgtttgcactcctctactggtttctcagtatgatgtgtgtgttatttaaaagtgtta

SEQ ID NO: 20972 - DNA, 80 bp, synthetic construct
  misc_feature 1..80: note = Synthetic: >MK472071_9-cand-2760-2839
  source 1..80: mol_type = other DNA
agaaacgcgatttaagtgtcttagctatggcccctgagcgtacaggtgttatactcagtcgtagtctgaagtataacttt

SEQ ID NO: 20973 - DNA, 80 bp, synthetic construct
  misc_feature 1..80: note = Synthetic: >MK472071_9-cand-2840-2919
  source 1..80: mol_type = other DNA
aaggctgtgcgaaagtacttgttttgcaaattaagtacgtttcgcttccttgctaagtcctttgcttttgtctatgcact

SEQ ID NO: 20974 - DNA, 80 bp, synthetic construct
  misc_feature 1..80: note = Synthetic: >MK472071_9-cand-2930-3009
  source 1..80: mol_type = other DNA
ctatttttattagtaagatttggtccgctaaatgcacctgtttgtgacgaatacgtgactggttatgcgaactctagctt

SEQ ID NO: 20975 - DNA, 80 bp, synthetic construct
  misc_feature 1..80: note = Synthetic: >MK472071_9-cand-3010-3089
  source 1..80: mol_type = other DNA
tgtaaagaatgactactgccccaacatcatttgcaagatgtgtctctacggctatcaagagcttaatgactttgcgcatt

SEQ ID NO: 20976 - DNA, 80 bp, synthetic construct
  misc_feature 1..80: note = Synthetic: >MK472071_9-cand-3100-3179
  source 1..80: mol_type = other DNA
ttgggaatttgttactcatcctttgcttcagagttgcatgccgttcatttacatgctgttcttgttatgctttggtaaca

SEQ ID NO: 20977 - DNA, 80 bp, synthetic construct
  misc_feature 1..80: note = Synthetic: >MK492263_1-cand-40-119
  source 1..80: mol_type = other DNA
ctatgcagattttgttaaattaagtgaaaccatgcgtcgtcaacttaaagttgctgcgcgcaagacaggtttgaacttgc

SEQ ID NO: 20978 - DNA, 80 bp, synthetic construct
  misc_feature 1..80: note = Synthetic: >MK492263_10-cand-0-79
  source 1..80: mol_type = other DNA
agttatcagtcttaatccagcatcaggtagtcacttggtgtgtcctactaataatgacacagatgttgtagaaaatcagt

SEQ ID NO: 20979 - DNA, 80 bp, synthetic construct
  misc_feature 1..80: note = Synthetic: >MK492263_10-cand-360-439
  source 1..80: mol_type = other DNA
ttctgacaatcaaactgctggtgtgtttgacacaccatctggttgtgtttataatgttattaatagaactgatatcacag

SEQ ID NO: 20980 - DNA, 80 bp, synthetic construct
  misc_feature 1..80: note = Synthetic: >MK492263_10-cand-450-529
  source 1..80: mol_type = other DNA
tgatatgcctattggtaacagtttatgtttaatcaacgctacgagcacgcaagctcgcgctacgagcggtgatgacacta

SEQ ID NO: 20981 - DNA, 80 bp, synthetic construct
  misc_feature 1..80: note = Synthetic: >MK492263_10-cand-630-709
  source 1..80: mol_type = other DNA
agctgcaggtactgaatatattcagacaacctcaccaaagattaatattgactgtgctaaatacctttgtggtgattctg

SEQ ID NO: 20982 - DNA, 80 bp, synthetic construct
  misc_feature 1..80: note = Synthetic: >MK492263_10-cand-720-799
  source 1..80: mol_type = other DNA
cacagttctattgcaatatggaactttttgtgatgacgtaaataaagcattagctgaggttagctcagttattgattcca

SEQ ID NO: 20983 - DNA, 80 bp, synthetic construct
  misc_feature 1..80: note = Synthetic: >MK492263_10-cand-810-889
  source 1..80: mol_type = other DNA
gctagtctctgaattgacagctgatgttgtgcgtagtgaaaacactgcgtttgacactacttataatttcacctctttga

SEQ ID NO: 20984 - DNA, 80 bp, synthetic construct
  misc_feature 1..80: note = Synthetic: >MK492263_10-cand-900-979
  source 1..80: mol_type = other DNA
tggttcatcttgcaatacaagaaattaccgatctgcactttctgatcttttatataataaagtcaaagttgcagaccctg

SEQ ID NO: 20985 - DNA, 80 bp, synthetic construct
  misc_feature 1..80: note = Synthetic: >MK492263_11-cand-0-79
  source 1..80: mol_type = other DNA
gtcttaatggttttaggcaaagtgagtcctggtgaaagtgatgatgcacatcgtgtgttatctacagtattttgtcatgg

SEQ ID NO: 20986 - DNA, 80 bp, synthetic construct
  misc_feature 1..80: note = Synthetic: >MK492263_11-cand-70-149
  source 1..80: mol_type = other DNA
tttgtcatggtacagttgatgctaggagagttaggtcaactgtttgtgaaacttgtggtgaagaccgtcaagttataact

SEQ ID NO: 20987 - DNA, 80 bp, synthetic construct
  misc_feature 1..80: note = Synthetic: >MK492263_11-cand-150-229
  source 1..80: mol_type = other DNA
ggtgtagatgcctgcaccttttatggttctgtggttttagatgacttgtataaacctgttagcgtaatttgtccttgtgg

SEQ ID NO: 20988 - DNA, 80 bp, synthetic construct
  misc_feature 1..80: note = Synthetic: >MK492263_11-cand-230-309
  source 1..80: mol_type = other DNA
cagaccagctataaggtatgtttcagaacaaagatctccttgggttttaatgtcccatactccgactgaaatacctttag

SEQ ID NO: 20989 - DNA, 80 bp, synthetic construct
  misc_feature 1..80: note = Synthetic: >MK492263_11-cand-320-399
  source 1..80: mol_type = other DNA
tagttggaaaacaacaactgtgtttaaaggtccagttactggtggtcattatatgtacgctgtgaatgatagtctcatag

SEQ ID NO: 20990 - DNA, 80 bp, synthetic construct
  misc_feature 1..80: note = Synthetic: >MK492263_11-cand-410-489
  source 1..80: mol_type = other DNA
tgcaaacactcgtaagcgtacaagtgatttgaaactacctgctactgacatgttgtatggtcctacggcatttacaagca

SEQ ID NO: 20991 - DNA, 80 bp, synthetic construct
  misc_feature 1..80: note = Synthetic: >MK492263_11-cand-500-579
  source 1..80: mol_type = other DNA
agttacatattatttggatggtgttaaacgtacaaccattgatccagacctcagtgtttatacacgtcgaggtgattact

SEQ ID NO: 20992 - DNA, 80 bp, synthetic construct
  misc_feature 1..80: note = Synthetic: >MK492263_11-cand-590-669
  source 1..80: mol_type = other DNA
tacacctttagaagtggtagcagcacctaagttaaatacaccttatgatggattttatctcttttcagatcaaaatgcgt

SEQ ID NO: 20993 - DNA, 80 bp, synthetic construct
  misc_feature 1..80: note = Synthetic: >MK492263_11-cand-670-749
  source 1..80: mol_type = other DNA
cattggctgaggactttaacaaggctattaatgcaactaagcaagggcctaagaaaattttaactgtctaccccaacact

SEQ ID NO: 20994 - DNA, 80 bp, synthetic construct
  misc_feature 1..80: note = Synthetic: >MK492263_11-cand-1040-1119
  source 1..80: mol_type = other DNA
taaaggagacttgctttgcctgaaagaatttacattgactgatctgcaaactttctatgttgaaggaactcaaccttttg

SEQ ID NO: 20995 - DNA, 80 bp, synthetic construct
  misc_feature 1..80: note = Synthetic: >MK492263_2-cand-0-79
  source 1..80: mol_type = other DNA
acatggagggtggtcttcaactctgttggagtttacccatcattgtagcccgtcccgagttacttcttaaagtggctcgt

SEQ ID NO: 20996 - DNA, 80 bp, synthetic construct
  misc_feature 1..80: note = Synthetic: >MK492263_2-cand-80-159
  source 1..80: mol_type = other DNA
gtgttacctgtaacctctactaacatctttgcatttctttgcttatgctacgcgttattatgcacaaaaccgactcgtgt

SEQ ID NO: 20997 - DNA, 80 bp, synthetic construct
  misc_feature 1..80: note = Synthetic: >MK492263_3-cand-160-239
  source 1..80: mol_type = other DNA
tttgcggaaaaataatgagtttgtgcaaccatctgacagctattttacacagtcacgtactttagaagattttcagcctg

SEQ ID NO: 20998 - DNA, 80 bp, synthetic construct
  misc_feature 1..80: note = Synthetic: >MK492263_4-cand-140-219
  source 1..80: mol_type = other DNA
cgaacagaatgaatatctacaatcttatagtggatgcatttagcattcctactactatgtcacctgaggaagctcagata

SEQ ID NO: 20999 - DNA, 80 bp, synthetic construct
  misc_feature 1..80: note = Synthetic: >MK492263_4-cand-250-329
  source 1..80: mol_type = other DNA
gcaattacatctacatccacagttatgcttatactctatacaacactttctctgttgttgtggtatttgggtaaatctag

SEQ ID NO: 21000 - DNA, 80 bp, synthetic construct
  misc_feature 1..80: note = Synthetic: >MK492263_5-cand-0-79
  source 1..80: mol_type = other DNA
ctcctggccgtaatgcacctaatgttgcttcaggtaatgagccatggatggcctatttagttcagaaactggaagcactg

SEQ ID NO: 21001 - DNA, 80 bp, synthetic construct
  misc_feature 1..80: note = Synthetic: >MK492263_5-cand-60-139
  source 1..80: mol_type = other DNA
ttcagaaactggaagcactggagaacaaagtcaatggtcctaaggagactaagaaaccagtgcaagttaccaagaatgag

SEQ ID NO: 21002 - DNA, 80 bp, synthetic construct
  misc_feature 1..80: note = Synthetic: >MK492263_5-cand-190-269
  source 1..80: mol_type = other DNA
cagcggcgttacaactaattatggtcgcagaggtcctggtgatcttgagggcaattttggagacctaaatatgttgaaac

SEQ ID NO: 21003 - DNA, 80 bp, synthetic construct
  misc_feature 1..80: note = Synthetic: >MK492263_5-cand-300-379
  source 1..80: mol_type = other DNA
ctgcgcaaatggctccaaatgtagcatcttttcttttcatgtcacatttttcagttagagaagaaaatgatgctctgtgg

SEQ ID NO: 21004 - DNA, 80 bp, synthetic construct
  misc_feature 1..80: note = Synthetic: >MK492263_6-cand-0-79
  source 1..80: mol_type = other DNA
ttatgtaaaattagcagaccacgttttcttgaagtgtgctgacattgttcaagaagcaaaggagtacacttattctgttc

SEQ ID NO: 21005 - DNA, 80 bp, synthetic construct
  misc_feature 1..80: note = Synthetic: >MK492263_6-cand-330-409
  source 1..80: mol_type = other DNA
aggttatgacagtgtgcttacacctttaatatctgctggtatctttggttactctgtagaagaatcactgcgtagtctag

SEQ ID NO: 21006 - DNA, 80 bp, synthetic construct
  misc_feature 1..80: note = Synthetic: >MK492263_6-cand-430-509
  source 1..80: mol_type = other DNA
acttatgtagtggtttatgataaacaactctatgaccgagctcgtgatgtggatcttacaccaccttctgacaatatgga

SEQ ID NO: 21007 - DNA, 80 bp, synthetic construct
  misc_feature 1..80: note = Synthetic: >MK492263_6-cand-530-609
  source 1..80: mol_type = other DNA
cacaagaggctagtcttaacttacctgtagaagatgttgaggctgatgtggctgcttgtgttaaagacatgttaagagct

SEQ ID NO: 21008 - DNA, 80 bp, synthetic construct
  misc_feature 1..80: note = Synthetic: >MK492263_6-cand-600-679
  source 1..80: mol_type = other DNA
gttaagagctgttgttaaaaaggtcaagaaagatttgaaaattaaacttgaacctgatgtaatgccagttgtggagacag

SEQ ID NO: 21009 - DNA, 80 bp, synthetic construct
  misc_feature 1..80: note = Synthetic: >MK492263_7-cand-0-79
  source 1..80: mol_type = other DNA
ctgtagcagaccctactaatcttgctaatgagagatcctaaggtttttgcagaaatgctttttcccttaacgaaccatga

SEQ ID NO: 21010 - DNA, 80 bp, synthetic construct
  misc_feature 1..80: note = Synthetic: >MK492263_7-cand-70-149
  source 1..80: mol_type = other DNA
cgaaccatgattaagcttttacttttagctatacttccctatactactgcgtttacattgattgtgcgcactcagtcatt

SEQ ID NO: 21011 - DNA, 80 bp, synthetic construct
  misc_feature 1..80: note = Synthetic: >MK492263_7-cand-160-239
  source 1..80: mol_type = other DNA
tctgaaaattctaattattgcagaggtttgttaacaccttgcgatggtacaatagtcagagtcgaagcatcatttaacac

SEQ ID NO: 21012 - DNA, 80 bp, synthetic construct
  misc_feature 1..80: note = Synthetic: >MK492263_7-cand-250-329
  source 1..80: mol_type = other DNA
ctctgttttaggcttaatggggtgttggaccaagatgttggcgttgtcattgtgtttacactcgttgacccttttggtaa

SEQ ID NO: 21013 - DNA, 80 bp, synthetic construct
  misc_feature 1..80: note = Synthetic: >MK492263_7-cand-330-409
  source 1..80: mol_type = other DNA
ttttatgtgtaagcatagtattgccaatggtgttttgccgcatactacatggggtgttagactaattagtctatcagtct

SEQ ID NO: 21014 - DNA, 80 bp, synthetic construct
  misc_feature 1..80: note = Synthetic: >MK492263_7-cand-600-679
  source 1..80: mol_type = other DNA
cgctatgtcccaattaccagtcacttatgcacctagcaaaagaggtcgttacgcaatccctattaaggatgaactttagg

SEQ ID NO: 21015 - DNA, 80 bp, synthetic construct
  misc_feature 1..80: note = Synthetic: >MK492263_8-cand-90-169
  source 1..80: mol_type = other DNA
ctgtagaatcagtcaaacaactttgtattgacaacaatgttagtgtgggtgtacattccattcctgaagatgaatttcac

SEQ ID NO: 21016 - DNA, 80 bp, synthetic construct
  misc_feature 1..80: note = Synthetic: >MK492263_8-cand-180-259
  source 1..80: mol_type = other DNA
tgggacctgtttactacactcaacgtacctattggtacgctgctttagcttctacaacattcactgctatgcgtacattc

SEQ ID NO: 21017 - DNA, 80 bp, synthetic construct
  misc_feature 1..80: note = Synthetic: >MK492263_8-cand-270-349
  source 1..80: mol_type = other DNA
aagaagagaaaatgcgcattttctgttttgaagcctactgtagagtgggttttaataagatgagtctggtgaaaaacact

SEQ ID NO: 21018 - DNA, 80 bp, synthetic construct
  misc_feature 1..80: note = Synthetic: >MK492263_8-cand-360-439
  source 1..80: mol_type = other DNA
atgcagaagcccttatagcgctttttaaggcacaatttactttgattaaaggtaaatttttctttcttaaggaagccttg

SEQ ID NO: 21019 - DNA, 80 bp, synthetic construct
  misc_feature 1..80: note = Synthetic: >MK492263_8-cand-450-529
  source 1..80: mol_type = other DNA
gtggtgctttgcgtgacttacttgctgtggtacttaccaaactgttaactactgcaagatgggctggatgtaaagtagaa

SEQ ID NO: 21020 - DNA, 80 bp, synthetic construct
  misc_feature 1..80: note = Synthetic: >MK492263_8-cand-540-619
  source 1..80: mol_type = other DNA
tagatggttactactacttttccaacagtggattattggcagaaacgcaggtttgtgctaaatctcttggtgtactgtta

SEQ ID NO: 21021 - DNA, 80 bp, synthetic construct
  misc_feature 1..80: note = Synthetic: >MK492263_8-cand-630-709
  source 1..80: mol_type = other DNA
aacagaaaatggaagtagaagttctgcaaggtgcttttgatgcaccagttgacttaaccactgacgaattggaagatgcc

SEQ ID NO: 21022 - DNA, 80 bp, synthetic construct
  misc_feature 1..80: note = Synthetic: >MK492263_8-cand-700-779
  source 1..80: mol_type = other DNA
ggaagatgccagtggcactcttgaggaggtttttggatcctcagatttagcacttgtaaaaggcagtttagttactatgg

SEQ ID NO: 21023 - DNA, 80 bp, synthetic construct
  misc_feature 1..80: note = Synthetic: >MK492263_8-cand-790-869
  source 1..80: mol_type = other DNA
atttgtgcgtacagaggatggtatcttctaccgctacgtccgtgaaggaggtgtgttacttaaacctttcagactacgtg

SEQ ID NO: 21024 - DNA, 80 bp, synthetic construct
  misc_feature 1..80: note = Synthetic: >MK492263_9-cand-10-89
  source 1..80: mol_type = other DNA
tcttgtcttttaccagacccttttatagcttattctggacaaacattgaagcagagcatttattatgctgacaccactaa

SEQ ID NO: 21025 - DNA, 80 bp, synthetic construct
  misc_feature 1..80: note = Synthetic: >MK492263_9-cand-100-179
  source 1..80: mol_type = other DNA
tatccagtcacgccatataagaaagatagtaaagccaccatgtacaacaccactcaggtgttagtaggcaatggcttatt

SEQ ID NO: 21026 - DNA, 80 bp, synthetic construct
  misc_feature 1..80: note = Synthetic: >MK492263_9-cand-200-279
  source 1..80: mol_type = other DNA
gagaacaagattctagtacatattgtcaagaaccatttggtgtagtcttcggtactacttttgaacaagatcgtattgcc

SEQ ID NO: 21027 - DNA, 80 bp, synthetic construct
  misc_feature 1..80: note = Synthetic: >MK492263_9-cand-290-369
  source 1..80: mol_type = other DNA
ttgttcctggcaacttaggatcttggcctactgttagtaaacctacaaccattaaggtttatattatagtgggtagcaat

SEQ ID NO: 21028 - DNA, 80 bp, synthetic construct
  misc_feature 1..80: note = Synthetic: >MK492263_9-cand-380-459
  source 1..80: mol_type = other DNA
gtgcatatccagcttttaatagatggggtccagctggtcaattttatgcagatgatgcatttgttaaccacggtgactcc

SEQ ID NO: 21029 - DNA, 80 bp, synthetic construct
  misc_feature 1..80: note = Synthetic: >MK492263_9-cand-440-519
  source 1..80: mol_type = other DNA
ttgttaaccacggtgactcctgttttgttaataacacctttgaaatccctcttaatacatctcgtattaacttggctttc

SEQ ID NO: 21030 - DNA, 80 bp, synthetic construct
  misc_feature 1..80: note = Synthetic: >MK492263_9-cand-530-609
  source 1..80: mol_type = other DNA
acggtaatttacttctttatcactctagatggcttccgacatctggcctcaatcttcttgaagacactccattacatttc

SEQ ID NO: 21031 - DNA, 80 bp, synthetic construct
  misc_feature 1..80: note = Synthetic: >MK492263_9-cand-620-699
  source 1..80: mol_type = other DNA
taggtgtaggtgctaacctacctaacgctcaattcttccagtctttaagtagatcgctagatggtagtggtgatggcaaa

SEQ ID NO: 21032 - DNA, 80 bp, synthetic construct
  misc_feature 1..80: note = Synthetic: >MK492263_9-cand-710-789
  source 1..80: mol_type = other DNA
cccagaataacttatatatagcaccaattgttcaacgtgagctactagtagcttacagtgatgctggtatacctactaaa

SEQ ID NO: 21033 - DNA, 80 bp, synthetic construct
  misc_feature 1..80: note = Synthetic: >MK492263_9-cand-800-879
  source 1..80: mol_type = other DNA
gttcactaaatgctggtgaagaactcttttgtgtaacaggcacgtttgacccacctactggtgtttatccactcagtagg

SEQ ID NO: 21034 - DNA, 80 bp, synthetic construct
  misc_feature 1..80: note = Synthetic: >MK574042_3-cand-90-169
  source 1..80: mol_type = other DNA
gaatacagaaactactacgcttacattaaataatttcactttttttaatcagagtggggctcaacctaatcaaaaggaat

SEQ ID NO: 21035 - DNA, 80 bp, synthetic construct; identical to SEQ ID NO: 21034
  misc_feature 1..80: note = Synthetic: >MK574043_3-cand-90-169
  source 1..80: mol_type = other DNA

SEQ ID NO: 21036 - DNA, 80 bp, synthetic construct
  misc_feature 1..80: note = Synthetic: >MK720944_1-cand-40-119
  source 1..80: mol_type = other DNA
acatgacttcaatataactaatgtcatgccagcaggacctgccagaggtagctttatagaggatttgctctttgataagg

SEQ ID NO: 21037 - DNA, 80 bp, synthetic construct
  misc_feature 1..80: note = Synthetic: >MK720944_10-cand-0-79
  source 1..80: mol_type = other DNA
gcagaaatcaggagcttatgcgtcctgtctttgatttcgctttgccgcaatcgctcgagattgtggatgcctctagacct

SEQ ID NO: 21038 - DNA, 80 bp, synthetic construct
  misc_feature 1..80: note = Synthetic: >MK720944_10-cand-90-169
  source 1..80: mol_type = other DNA
ccaattcacgtgctcggagtcagagtaactcaagttccaactcaaggcctcaaagccaaaacagaggaagcagaaaccaa

SEQ ID NO: 21039 - DNA, 80 bp, synthetic construct
  misc_feature 1..80: note = Synthetic: >MK720944_10-cand-180-259
  source 1..80: mol_type = other DNA
gtcagccacagcagcaacaacagcagcgtaggcagacacaaaataatacatccagaaacaataatcaaaatggaggtcaa

SEQ ID NO: 21040 - DNA, 80 bp, synthetic construct
  misc_feature 1..80: note = Synthetic: >MK720944_10-cand-260-339
  source 1..80: mol_type = other DNA
cgcagtcagtctagaggtagatctaacacgaggaatggtaataattccgggaacaaccaacaagacttggttgctgccgt

SEQ ID NO: 21041 - DNA, 80 bp, synthetic construct
  misc_feature 1..80: note = Synthetic: >MK720944_10-cand-350-429
  source 1..80: mol_type = other DNA
cttgttggactaggtattacatccaaacctcagactagtggcaagaacactcctaagcgttctaagtcaccagctcagaa

SEQ ID NO: 21042 - DNA, 80 bp, synthetic construct
  misc_feature 1..80: note = Synthetic: >MK720944_10-cand-430-509
  source 1..80: mol_type = other DNA
gactgtcgttgaacagatgggcaaacctacctggaagagaactccacattctaatgaagatgtcactaagtgctttggcc

SEQ ID NO: 21043 - DNA, 80 bp, synthetic construct
  misc_feature 1..80: note = Synthetic: >MK720944_10-cand-520-599
  source 1..80: mol_type = other DNA
acatcagaattttggagactcacagcttgtgcgtttgggtgttgattatccatactacccacaacttgcacagcttgttc

SEQ ID NO: 21044 - DNA, 80 bp, synthetic construct
  misc_feature 1..80: note = Synthetic: >MK720944_10-cand-610-689
  source 1..80: mol_type = other DNA
agctatgctgtttggcagtgagatcacagcgcatgaagtaggtgaagacattcagcttacatatgtgtacaaaatgaaag

SEQ ID NO: 21045 - DNA, 80 bp, synthetic construct
  misc_feature 1..80: note = Synthetic: >MK720944_10-cand-700-779
  source 1..80: mol_type = other DNA
ggatccttcactggtacgctttttgcctcacattggtgcttttgctgataatgttgaagacgttacagctttggatccta

SEQ ID NO: 21046 - DNA, 80 bp, synthetic construct
  misc_feature 1..80: note = Synthetic: >MK720944_10-cand-790-869
  source 1..80: mol_type = other DNA
ttttacaccccaactacagaggctgcgtcgtcatgtttctatggaaactttggctgacacaactcatgatgaagatgagg

SEQ ID NO: 21047 - DNA, 80 bp, synthetic construct
  misc_feature 1..80: note = Synthetic: >MK720944_10-cand-870-949
  source 1..80: mol_type = other DNA
tcgagatcatggatgacgtgatcattgaagatgaaactagcgcttgatcaactaaattatgaaactctttcttttgcttt

SEQ ID NO: 21048 - DNA, 80 bp, synthetic construct
  misc_feature 1..80: note = Synthetic: >MK720944_10-cand-960-1039
  source 1..80: mol_type = other DNA
cattagtgttgattcactacctgtccctaaattaaatattctgcttaaagaaacccactgtgaattcagtggtgctcgcg

SEQ ID NO: 21049 - DNA, 80 bp, synthetic construct
  misc_feature 1..80: note = Synthetic: >MK720944_10-cand-1050-1129
  source 1..80: mol_type = other DNA
cagacaaatgctccgttatcggtgctttgaagatgccaaatatgcaacaaaaggtgtttacttgaacatctatcgtaaac

SEQ ID NO: 21050 - DNA, 80 bp, synthetic construct
  misc_feature 1..80: note = Synthetic: >MK720944_10-cand-1140-1219
  source 1..80: mol_type = other DNA
taatggagatgtaatttacagaccagggcatggtgacatttatgaaccaattaccccaactgctgattcaagtacaccaa

SEQ ID NO: 21051 - DNA, 80 bp, synthetic construct
  misc_feature 1..80: note = Synthetic: >MK720944_10-cand-1220-1299
  source 1..80: mol_type = other DNA
aacaaaacaaagccaatgctgaaaccactggctatcgtagagacgctccttacacaactacggtgtaaggatggacttgt

SEQ ID NO: 21052 - DNA, 80 bp, synthetic construct
  misc_feature 1..80: note = Synthetic: >MK720944_10-cand-1300-1379
  source 1..80: mol_type = other DNA
gctcaacggtaggccagtggttgtatcagcacaatgaaggatacaaccatattgcagttacgagacgaaaattatatctt

SEQ ID NO: 21053 - DNA, 80 bp, synthetic construct
  misc_feature 1..80: note = Synthetic: >MK720944_10-cand-1490-1569
  source 1..80: mol_type = other DNA
aataaaggtgatggagaatacattacatactaacagggaagaactggtattacacttagcaatgattgattagtaattta

SEQ ID NO: 21054 - DNA, 80 bp, synthetic construct
  misc_feature 1..80: note = Synthetic: >MK720944_11-cand-0-79
  source 1..80: mol_type = other DNA
acggctttacctttgtgaccttaaatggttttgcaggtggagttgttaatgtggataattacctttgtgattcttatggc

SEQ ID NO: 21055 - DNA, 80 bp, synthetic construct
  misc_feature 1..80: note = Synthetic: >MK720944_11-cand-80-159
  source 1..80: mol_type = other DNA
aagccagtgttatcgtcagatatttggcaatgtcaagattactttggtgaattagacactgttgttgtcaatggtgtctc

SEQ ID NO: 21056 - DNA, 80 bp, synthetic construct
  misc_feature 1..80: note = Synthetic: >MK720944_11-cand-160-239
  source 1..80: mol_type = other DNA
ttactttaaggcttggagcgttgaacgcgatgatttgtcttataatcttcaatctgtgactgctataaaatctatagttt

SEQ ID NO: 21057 - DNA, 80 bp, synthetic construct
  misc_feature 1..80: note = Synthetic: >MK720944_11-cand-240-319
  source 1..80: mol_type = other DNA
ggaattgtgatgctgcccatgtactccctgatggaactgtgcgtagtgttgcaaagcctgtgactaagagtaaagttgtt

SEQ ID NO: 21058 - DNA, 80 bp, synthetic construct
  misc_feature 1..80: note = Synthetic: >MK720944_11-cand-320-399
  source 1..80: mol_type = other DNA
aagctctctgagccttttgcaactgtttatgaacagattggtagtccatacatgaccaatggtgttttacttttggatgt

SEQ ID NO: 21059 - DNA, 80 bp, synthetic construct
  misc_feature 1..80: note = Synthetic: >MK720944_11-cand-400-479
  source 1..80: mol_type = other DNA
cttgactaagccttgtttcttacatgcctatgttcattgtaagtgtggtaataaacgatggactgttggcgattggcatg

SEQ ID NO: 21060 - DNA, 80 bp, synthetic construct
  misc_feature 1..80: note = Synthetic: >MK720944_11-cand-480-559
  source 1..80: mol_type = other DNA
ttggttacaaatcaccttgttgtggtttgaaatgcacgccaatttgctatgctactggctatgttgaaccaggtgacgtt

SEQ ID NO: 21061 - DNA, 80 bp, synthetic construct
  misc_feature 1..80: note = Synthetic: >MK720944_11-cand-560-639
  source 1..80: mol_type = other DNA
gttctcacctctgtaagtgctggttctggtactaagtactataaaggttgtactttaaagtacgttggtgatgcttctaa

SEQ ID NO: 21062 - DNA, 80 bp, synthetic construct
  misc_feature 1..80: note = Synthetic: >MK720944_11-cand-640-719
  source 1..80: mol_type = other DNA
agtttccatttggcgtgtgttgaaaactcatgccgtggatggatttgtgtcatgcagtcgttttgaagatgaatttgtag

SEQ ID NO: 21063 - DNA, 80 bp, synthetic construct
  misc_feature 1..80: note = Synthetic: >MK720944_11-cand-720-799
  source 1..80: mol_type = other DNA
catcttttgattcttgtagtgttgagaacacttcttcattagcattgtcgctaaagtatggtttacttagtggtgattat

SEQ ID NO: 21064 - DNA, 80 bp, synthetic construct
  misc_feature 1..80: note = Synthetic: >MK720944_11-cand-800-879
  source 1..80: mol_type = other DNA
gatgatagtgttgttaatgctgtcaagagtggagttattaacttggggttgtccatagttgatgtttttgatgatatttg

SEQ ID NO: 21065 - DNA, 80 bp, synthetic construct
  misc_feature 1..80: note = Synthetic: >MK720944_11-cand-880-959
  source 1..80: mol_type = other DNA
tgttattccaaaatggcttcaaaagttaggtactttgggtttaaacatctggtctagctttaaaacttttttgcatacag

SEQ ID NO: 21066 - DNA, 80 bp, synthetic construct
  misc_feature 1..80: note = Synthetic: >MK720944_11-cand-960-1039
  source 1..80: mol_type = other DNA
tttttgaaacttctgagaaactagttggttttatcaattttatttctaatgctacttgtgttgtggctaatggtatttta

SEQ ID NO: 21067 - DNA, 80 bp, synthetic construct
  misc_feature 1..80: note = Synthetic: >MK720944_11-cand-1040-1119
  source 1..80: mol_type = other DNA
gacttggttattcctgtgagttcttcttggaatgttatagtggaccatcttaaaaatttggttcagggagctgttacact

SEQ ID NO: 21068 - DNA, 80 bp, synthetic construct
  misc_feature 1..80: note = Synthetic: >MK720944_11-cand-1120-1199
  source 1..80: mol_type = other DNA
ttttgtggatgagttcaagtttgctggtgcaagttttaagcgttttgctgattatgtgctttttgacaatgctctctgcc

SEQ ID NO: 21069 - DNA, 80 bp, synthetic construct
  misc_feature 1..80: note = Synthetic: >MK720944_11-cand-1200-1279
  source 1..80: mol_type = other DNA
atttggctagtgcgagaattaaaggtactaagcaggatggtcttaaaaatgctaattatttgagcattgtttatggtcct

SEQ ID NO: 21070 - DNA, 80 bp, synthetic construct
  misc_feature 1..80: note = Synthetic: >MK720944_11-cand-1280-1359
  source 1..80: mol_type = other DNA
actaagcgtgttaaagtgtcacgttttgaaaagtcaactgccaatttgtccatttgtgaagataacattcctccagagca

SEQ ID NO: 21071 - DNA, 80 bp, synthetic construct
  misc_feature 1..80: note = Synthetic: >MK720944_11-cand-1360-1439
  source 1..80: mol_type = other DNA
aggcaatgccgttgttattggtgatattgctttctttacagatggtacatattattggtttatggctgataatgcatctg

SEQ ID NO: 21072 - DNA, 80 bp, synthetic construct
  misc_feature 1..80: note = Synthetic: >MK720944_11-cand-1450-1529
  source 1..80: mol_type = other DNA
accagtctttaagactggtagttttcagtgtcctgatttattggaacaagttgatagtggtacaatctttcaaaaggttg

SEQ ID NO: 21073 - DNA, 80 bp, synthetic construct
  misc_feature 1..80: note = Synthetic: >MK720944_11-cand-1540-1619
  source 1..80: mol_type = other DNA
taatgattcttctggtttttgtaaaaaccttaaagttgattatggccttgagggttttgttgttaatgcccctaagaagt

SEQ ID NO: 21074 - DNA, 80 bp, synthetic construct
  misc_feature 1..80: note = Synthetic: >MK720944_11-cand-1620-1699
  source 1..80: mol_type = other DNA
ataaatcatttgctaatagtgtttctactatgtataatgattttgctacaagtgtttctagtgttgttaaactggctggt

SEQ ID NO: 21075 - DNA, 80 bp, synthetic construct
  misc_feature 1..80: note = Synthetic: >MK720944_11-cand-1700-1779
  source 1..80: mol_type = other DNA
gttagttttacacattatgcattcataaaacctatgttggcctttaatggtacattgtttctagtagacaaaaaggttgc

SEQ ID NO: 21076 - DNA, 80 bp, synthetic construct
  misc_feature 1..80: note = Synthetic: >MK720944_11-cand-1780-1859
  source 1..80: mol_type = other DNA
accatctaacgttcctgttgtagattctcttaaggactttatggtctttaaggatgttaaaacaaaagttgtacctaagg

SEQ ID NO: 21077 - DNA, 80 bp, synthetic construct
  misc_feature 1..80: note = Synthetic: >MK720944_12-cand-0-79
  source 1..80: mol_type = other DNA
ccgttcttgcaggcatgaacattagattaggtttgcctccaagtacatccacttttgtttctggttatttacctaaacct

SEQ ID NO: 21078 - DNA, 80 bp, synthetic construct
  misc_feature 1..80: note = Synthetic: >MK720944_12-cand-80-159
  source 1..80: mol_type = other DNA
agtggctggaattgtgttggttctggtacacctaatgttgtggttgataaagctcgtggtgtttttatgcgttaccatag

SEQ ID NO: 21079 - DNA, 80 bp, synthetic construct
  misc_feature 1..80: note = Synthetic: >MK720944_12-cand-160-239
  source 1..80: mol_type = other DNA
ctatgcacaggagggtgcttttggtgttggacctcgtgatgtctcaacatccaatagctattctctatttgtgtggcaga

SEQ ID NO: 21080 - DNA, 80 bp, synthetic construct
  misc_feature 1..80: note = Synthetic: >MK720944_12-cand-240-319
  source 1..80: mol_type = other DNA
aaaatggttctggtaaaatggttgtgcgcatttgcaagtggtttcagaacagaattcctaatcttgctgcacctcaagct

SEQ ID NO: 21081 - DNA, 80 bp, synthetic construct
  misc_feature 1..80: note = Synthetic: >MK720944_12-cand-320-399
  source 1..80: mol_type = other DNA
acaagttctagcgattgcttatttaacaaagatatacctttcacgtttacacatgaagcctatgaagtcattggtgcttc

SEQ ID NO: 21082 - DNA, 80 bp, synthetic construct
  misc_feature 1..80: note = Synthetic: >MK720944_12-cand-400-479
  source 1..80: mol_type = other DNA
ttggacaggtgacattgttactgtgcatggtagatctagggtttacaaggttcgcgtacctggtgctagtttgtggacat

SEQ ID NO: 21083 - DNA, 80 bp, synthetic construct
  misc_feature 1..80: note = Synthetic: >MK720944_12-cand-480-559
  source 1..80: mol_type = other DNA
ctgttcaatttcgttgtaatgtggcgcaatcttgtggcaatcaaatcattactgatatgattaccataaatgccactaca

SEQ ID NO: 21084 - DNA, 80 bp, synthetic construct
  misc_feature 1..80: note = Synthetic: >MK720944_12-cand-560-639
  source 1..80: mol_type = other DNA
gatgccaatagtgttatcacctcttataaagtgtgtgatagctgtaaaggttttcctcagcatgtttttgctgtagagga

SEQ ID NO: 21085 - DNA, 80 bp, synthetic construct
  misc_feature 1..80: note = Synthetic: >MK720944_12-cand-640-719
  source 1..80: mol_type = other DNA
agatggtaagataccctcttcctttgacttcaccaattggtttttccttactaatggcacttcaccattgcaaggccgaa

SEQ ID NO: 21086 - DNA, 80 bp, synthetic construct
  misc_feature 1..80: note = Synthetic: >MK720944_12-cand-720-799
  source 1..80: mol_type = other DNA
tcgttacagtgcaacctttgataattacatgtttgtggcctatacctgctttaagttctaatactggcatcatttatttt

SEQ ID NO: 21087 - DNA, 80 bp, synthetic construct
  misc_feature 1..80: note = Synthetic: >MK720944_12-cand-800-879
  source 1..80: mol_type = other DNA
aatcaaacaggacgtggcattgctcgtaggtgtaatggttatgcaagtgaggcttctgctgattacttgcgttttgctat

SEQ ID NO: 21088 - DNA, 80 bp, synthetic construct
  misc_feature 1..80: note = Synthetic: >MK720944_12-cand-880-959
  source 1..80: mol_type = other DNA
taacgctactaccgctggcagcgtccaaattggtagtatctctttggtggcagaaaatactatttttaacttttcttgta

SEQ ID NO: 21089 - DNA, 80 bp, synthetic construct
  misc_feature 1..80: note = Synthetic: >MK720944_12-cand-960-1039
  source 1..80: mol_type = other DNA
gtaacactagtacaggtgttacctttggtataccttttggtgttaaagacaacccattttattgttttgtcacacaaggt

SEQ ID NO: 21090 - DNA, 80 bp, synthetic construct
  misc_feature 1..80: note = Synthetic: >MK720944_12-cand-1040-1119
  source 1..80: mol_type = other DNA
tataatatttctgctaatcgtacctttgtaggtgttatgccatctgatgtcagtgagatagtggtgtcaagatttggctc

SEQ ID NO: 21091 - DNA, 80 bp, synthetic construct
  misc_feature 1..80: note = Synthetic: >MK720944_12-cand-1120-1199
  source 1..80: mol_type = other DNA
tatctatgttaatggctataagattttcacagttccttctttggatggtgtgaatttaaattttagcagtctcactggtt

SEQ ID NO: 21092 - DNA, 80 bp, synthetic construct
  misc_feature 1..80: note = Synthetic: >MK720944_12-cand-1200-1279
  source 1..80: mol_type = other DNA
cagatttttggacagttgcctatgctaatgatgcaaacgtgctgcttgacatagaaaacacctacataaagggcatactt

SEQ ID NO: 21093 - DNA, 80 bp, synthetic construct
  misc_feature 1..80: note = Synthetic: >MK720944_12-cand-1280-1359
  source 1..80: mol_type = other DNA
tattgtgattcgcctcttaataagttgaagtgtcagcaacagagcttctttatggaagatggtttttacccttcagctga

SEQ ID NO: 21094 - DNA, 80 bp, synthetic construct
  misc_feature 1..80: note = Synthetic: >MK720944_12-cand-1360-1439
  source 1..80: mol_type = other DNA
tttggcaatgccagtggctcagacagtggttatgttgccacaatattctggccttactagagttgattttgttatcaatg

SEQ ID NO: 21095 - DNA, 80 bp, synthetic construct
  misc_feature 1..80: note = Synthetic: >MK720944_12-cand-1440-1519
  source 1..80: mol_type = other DNA
caagcattgctagtattcagtctcagcctactaatgtaaaaacctctattaatggtgttgaaaaagccactttgtgtgtt

SEQ ID NO: 21096 - DNA, 80 bp, synthetic construct
  misc_feature 1..80: note = Synthetic: >MK720944_12-cand-1520-1599
  source 1..80: mol_type = other DNA
gatgctaatcggtttactacaactgttaaagtcaactcgccagaagggcatttaatgtcttaccaatttgtttctaaaac

SEQ ID NO: 21097 - DNA, 80 bp, synthetic construct
  misc_feature 1..80: note = Synthetic: >MK720944_12-cand-1600-1679
  source 1..80: mol_type = other DNA
taataactgtccatttgattgggctggtattaataattacttgcattttggtagcatttgcttttctcttgagaacaacg

SEQ ID NO: 21098 - DNA, 80 bp, synthetic construct
  misc_feature 1..80: note = Synthetic: >MK720944_12-cand-1680-1759
  source 1..80: mol_type = other DNA
gtggctgtactattgtgttttcactaattaattatattggcatagaatattttcttgctaatatgtatgtgacacacaca

SEQ ID NO: 21099 - DNA, 80 bp, synthetic construct
  misc_feature 1..80: note = Synthetic: >MK720944_12-cand-1760-1839
  source 1..80: mol_type = other DNA
ccaggcgattctataatcagtgttcaaccctctttttctgaacgacttggtttctttgaccctagcattgtccaccttaa

SEQ ID NO: 21100 - DNA, 80 bp, synthetic construct
  misc_feature 1..80: note = Synthetic: >MK720944_12-cand-1840-1919
  source 1..80: mol_type = other DNA
tgtttgtactgaatacaacatttatggcattgctggtaagggtattatcactgagctcaatggcacttaccatactggta

SEQ ID NO: 21101 - DNA, 80 bp, synthetic construct
  misc_feature 1..80: note = Synthetic: >MK720944_12-cand-1920-1999
  source 1..80: mol_type = other DNA
tagtgtatacagattctgctggtgctttagttagttacaaaaataccaccactggaaaagtttatggtgtgcgtccatgc

SEQ ID NO: 21102 - DNA, 80 bp, synthetic construct
  misc_feature 1..80: note = Synthetic: >MK720944_12-cand-2000-2079
  source 1..80: mol_type = other DNA
caaactttcatgcaatatgctgttgtacaagaccaagtagttggtgttatgtcagctagcacagatgttggtattagttt

SEQ ID NO: 21103 - DNA, 80 bp, synthetic construct
  misc_feature 1..80: note = Synthetic: >MK720944_2-cand-0-79
  source 1..80: mol_type = other DNA
gtgataagttttatgtaacacctcgtaatatgtaccagccacgtgtacctacttttgccgactttgtccaaattcagtca

SEQ ID NO: 21104 - DNA, 80 bp, synthetic construct
  misc_feature 1..80: note = Synthetic: >MK720944_2-cand-80-159
  source 1..80: mol_type = other DNA
tgcgctattacctatgttaatataacaactgaggagtttaatagtgttgtgcctgattatatagatgttaataagacctt

SEQ ID NO: 21105 - DNA, 80 bp, synthetic construct
  misc_feature 1..80: note = Synthetic: >MK720944_3-cand-0-79
  source 1..80: mol_type = other DNA
ggactatgaggctgagcgtccatttacaacttttacaaagagtgtttgtagttatacagattttaaagaggacgtatgta

SEQ ID NO: 21106 - DNA, 80 bp, synthetic construct
  misc_feature 1..80: note = Synthetic: >MK720944_3-cand-80-159
  source 1..80: mol_type = other DNA
catgctatgatgaaagtattcctggttctttagagaactttacattagctaaaaatgctgtcctcatatctaatagagct

SEQ ID NO: 21107 - DNA, 80 bp, synthetic construct
  misc_feature 1..80: note = Synthetic: >MK720944_4-cand-170-249
  source 1..80: mol_type = other DNA
ggtgtgtttaacatatttatatgttgttttgctagtggtttacacctttataggtttaattctagcagtattggatctgt

SEQ ID NO: 21108 - DNA, 80 bp, synthetic construct
  misc_feature 1..80: note = Synthetic: >MK720944_4-cand-300-379
  source 1..80: mol_type = other DNA
ccacagattatttgtctgttgctatggtgtttcttttaaatatgtctcacacatggtatataggtttaattgtttataaa

SEQ ID NO: 21109 - DNA, 80 bp, synthetic construct
  misc_feature 1..80: note = Synthetic: >MK720944_5-cand-0-79
  source 1..80: mol_type = other DNA
caacatactgctttaaagaaggtattgttgaaggtgctcgtttatattctgcccttttacctaatgtccattataaaatg

SEQ ID NO: 21110 - DNA, 80 bp, synthetic construct
  misc_feature 1..80: note = Synthetic: >MK720944_5-cand-60-139
  source 1..80: mol_type = other DNA
ctaatgtccattataaaatggagggtggtcagtatataaagttgcctgacttaatcgtgagaggcgctggttttagggtt

SEQ ID NO: 21111 - DNA, 80 bp, synthetic construct
  misc_feature 1..80: note = Synthetic: >MK720944_5-cand-160-239
  source 1..80: mol_type = other DNA
atattgtagagcgggtcagtgtgtcgattctaaagctggtgtatgttttggcgttgatagatttttagtttataatgctg

SEQ ID NO: 21112 - DNA, 80 bp, synthetic construct
  misc_feature 1..80: note = Synthetic: >MK720944_5-cand-260-339
  source 1..80: mol_type = other DNA
tgtggcagtggtctttttggcttgctttacaatctcttatcaatcttctctagttcttttagtgtagttgcactctcagg

SEQ ID NO: 21113 - DNA, 80 bp, synthetic construct
  misc_feature 1..80: note = Synthetic: >MK720944_5-cand-360-439
  source 1..80: mol_type = other DNA
ttgtggctattattgctgtatttttgtgcttcactattgtcaaattcaaacgtatgtttggtgacatgtcacgtggagtc

SEQ ID NO: 21114 - DNA, 80 bp, synthetic construct
  misc_feature 1..80: note = Synthetic: >MK720944_5-cand-430-509
  source 1..80: mol_type = other DNA
acgtggagtctgtatagttgtagctactgttattgttaatagtctgtcatatgttataacacagaattttattggtatgt

SEQ ID NO: 21115 - DNA, 80 bp, synthetic construct
  misc_feature 1..80: note = Synthetic: >MK720944_6-cand-0-79
  source 1..80: mol_type = other DNA
aaaagtccttttgcttttgattattacaagagtggtgacttagtggttttaaaacaggatagtaacaactgttgggttaa

SEQ ID NO: 21116 - DNA, 80 bp, synthetic construct
  misc_feature 1..80: note = Synthetic: >MK720944_6-cand-50-129
  source 1..80: mol_type = other DNA
aaaacaggatagtaacaactgttgggttaactcagcttgtatacaccttcaaatattagactttgaagaccctgccttgg

SEQ ID NO: 21117 - DNA, 80 bp, synthetic construct
  misc_feature 1..80: note = Synthetic: >MK720944_6-cand-160-239
  source 1..80: mol_type = other DNA
ttgtgcagcgttgttatgaagctgttaatttggttaagggttctatgggtgatgttacagagtgtcttgagtttttgctt

SEQ ID NO: 21118 - DNA, 80 bp, synthetic construct
  misc_feature 1..80: note = Synthetic: >MK720944_6-cand-270-349
  source 1..80: mol_type = other DNA
gatgctacttgtaactgtggtccttcagagtatgttttgaatggctgcgtgtttcgttttatgcccaattctgaaccttt

SEQ ID NO: 21119 - DNA, 80 bp, synthetic construct
  misc_feature 1..80: note = Synthetic: >MK720944_6-cand-370-449
  source 1..80: mol_type = other DNA
gtaacagtgttttgttttgtaacataaagagtattaaaggcagtgctgttttctgtcaaaatcctggtcctgttgatgac

SEQ ID NO: 21120 - DNA, 80 bp, synthetic construct
  misc_feature 1..80: note = Synthetic: >MK720944_6-cand-460-539
  source 1..80: mol_type = other DNA
agccagatgtagccgcatcttttattggtagcattagtggcggtcattactgtactaatgtttacgcaatgaatgtagca

SEQ ID NO: 21121 - DNA, 80 bp, synthetic construct
  misc_feature 1..80: note = Synthetic: >MK720944_7-cand-0-79
  source 1..80: mol_type = other DNA
tctgttaaaatagaacaaaacctgaaaccttatttggttgaaggtggtgtttctttttataattgtgaagctgttacaat

SEQ ID NO: 21122 - DNA, 80 bp, synthetic construct
  misc_feature 1..80: note = Synthetic: >MK720944_7-cand-90-169
  source 1..80: mol_type = other DNA
tttgatcgctatgtcttctttattgaagaaagtaagaagatgtgtgatttggccttatcatttaatgaaattgttggtgg

SEQ ID NO: 21123 - DNA, 80 bp, synthetic construct
  misc_feature 1..80: note = Synthetic: >MK720944_7-cand-180-259
  source 1..80: mol_type = other DNA
gatgcattaacacaatgtggtaagttgccagctggtaatgttttaacaattaaagttagtggtgacgatgcaagagaatt

SEQ ID NO: 21124 - DNA, 80 bp, synthetic construct
  misc_feature 1..80: note = Synthetic: >MK720944_7-cand-270-349
  source 1..80: mol_type = other DNA
tttatagtgttgccaaaaattggtgatgttggttatgataaaaatcttaaccgtgcaattaacaaactttttaagtttgg

SEQ ID NO: 21125 - DNA, 80 bp, synthetic construct
  misc_feature 1..80: note = Synthetic: >MK720944_7-cand-360-439
  source 1..80: mol_type = other DNA
gttgtcacagttcctaatgtggaagtcttttcaaaaattgtggttaagtctaatgctttttgggtttgttctaagacaga

SEQ ID NO: 21126 - DNA, 80 bp, synthetic construct
  misc_feature 1..80: note = Synthetic: >MK720944_8-cand-130-209
  source 1..80: mol_type = other DNA
atatttctcagtctgtttgtgtactactttgctgcttttaggtgtagtagctttagacttaatgtcttatgttttgtctg

SEQ ID NO: 21127 - DNA, 80 bp, synthetic construct
  misc_feature 1..80: note = Synthetic: >MK720944_8-cand-230-309
  source 1..80: mol_type = other DNA
tctacgcacctttattactttatacaggtgcttatgttgatgctgctactactgcgttattggtttttagtaggcttatc

SEQ ID NO: 21128 - DNA, 80 bp, synthetic construct
  misc_feature 1..80: note = Synthetic: >MK720944_8-cand-330-409
  source 1..80: mol_type = other DNA
gcgctatcgcagtttctattacatattacttaatgacaccacattgatgtggttattgggtaagtgttggtatctgtgtc

SEQ ID NO: 21129 - DNA, 80 bp, synthetic construct
  misc_feature 1..80: note = Synthetic: >MK720944_8-cand-430-509
  source 1..80: mol_type = other DNA
cttcgtggtggtgacacatatgtacgactaggaccacattttataccttttgtggatcctgaaagtcttttactttcatt

SEQ ID NO: 21130 - DNA, 80 bp, synthetic construct
  misc_feature 1..80: note = Synthetic: >MK720944_8-cand-530-609
  source 1..80: mol_type = other DNA
cagcttctcttattagaagagttaacctcattaatggtgacctcttttatatttttgacacacgaccttgtatcgttgat

SEQ ID NO: 21131 - DNA, 80 bp, synthetic construct
  misc_feature 1..80: note = Synthetic: >MK720944_8-cand-630-709
  source 1..80: mol_type = other DNA
atattcttctcaactttgcgaaatgtttcttcgtttggttaaagatgatggttttgtagtcaatgccattttatgggttt

SEQ ID NO: 21132 - DNA, 80 bp, synthetic construct
  misc_feature 1..80: note = Synthetic: >MK720944_9-cand-0-79
  source 1..80: mol_type = other DNA
tttaaaaatcgccaaatatttaaaacctactgctaagtttacagtagaaaagtctacagacactggttgttgtgatgaga

SEQ ID NO: 21133 - DNA, 80 bp, synthetic construct
  misc_feature 1..80: note = Synthetic: >MK720944_9-cand-80-159
  source 1..80: mol_type = other DNA
gctatattgttaatagtgctgtcctaagttcttgtgttcttaggagtggtattaatgacggtttttgtaaacatggtctt

SEQ ID NO: 21134 - DNA, 80 bp, synthetic construct
  misc_feature 1..80: note = Synthetic: >MK720944_9-cand-170-249
  source 1..80: mol_type = other DNA
gacgtgtcacatctgtagaaggaagtggcattgttttaaatacacatgaacccactgttgtttcaaaattagctctttta

SEQ ID NO: 21135 - DNA, 80 bp, synthetic construct
  misc_feature 1..80: note = Synthetic: >MK720944_9-cand-260-339
  source 1..80: mol_type = other DNA
cttatactgcattttcaggtgacataggtagtggtcattatgttgtcgtagatagtaatactaatgtttcttttgacggc

SEQ ID NO: 21136 - DNA, 80 bp, synthetic construct
  misc_feature 1..80: note = Synthetic: >MK720944_9-cand-350-429
  source 1..80: mol_type = other DNA
agcccactgacgtttcatgtgcttgtgtcactgctgttgtagttaaaaatatgtactttgtttctaaaccaaatgtgcca

SEQ ID NO: 21137 - DNA, 80 bp, synthetic construct
  misc_feature 1..80: note = Synthetic: >MK720944_9-cand-440-519
  source 1..80: mol_type = other DNA
ctaaagtagtagatactcttaatgcagcagctaatggtttctttggttgtggtgatttcttatttaagaatttgttcacc

SEQ ID NO: 21138 - DNA, 80 bp, synthetic construct
  misc_feature 1..80: note = Synthetic: >MK720944_9-cand-530-609
  source 1..80: mol_type = other DNA
ggttatttagtatgtttttgttacttaaaaacgttaaaaagcgtgatattagtgttttagctttggccccggaacgtact

SEQ ID NO: 21139 - DNA, 80 bp, synthetic construct
  misc_feature 1..80: note = Synthetic: >MK720944_9-cand-580-659
  source 1..80: mol_type = other DNA
agtgttttagctttggccccggaacgtactggcattatacttaagcgtagtcttaggtataatttaaagtatagttataa

SEQ ID NO: 21140 - DNA, 80 bp, synthetic construct
  misc_feature 1..80: note = Synthetic: >MK720944_9-cand-670-749
  source 1..80: mol_type = other DNA
tctaaatggtctacttttaagtttttatctaagttatttatggctatttacgcgctttatatgttgcttttcctactaat

SEQ ID NO: 21141 - DNA, 80 bp, synthetic construct
  misc_feature 1..80: note = Synthetic: >MK720944_9-cand-760-839
  source 1..80: mol_type = other DNA
cctttaaatgaacctgtttgttcatcttatgtagaaggttattcaaattctagttttgtcaaatctgattactgtgataa

SEQ ID NO: 21142 - DNA, 80 bp, synthetic construct
  misc_feature 1..80: note = Synthetic: >MK720944_9-cand-850-929
  source 1..80: mol_type = other DNA
aaactttgtttatatggttttcaagaacttagtgatttgccgcatcttaaccttaagtgggagtttgtgactcatccttt

SEQ ID NO: 21143 - DNA, 80 bp, synthetic construct
  misc_feature 1..80: note = Synthetic: >MK720945_2-cand-40-119
  source 1..80: mol_type = other DNA
ctatcttaacactttgcctactgctgttgaagtgcctgaatctcttaaagagaaaggaccgattgtaccaccaaaacctt

SEQ ID NO: 21144 - DNA, 80 bp, synthetic construct
  misc_feature 1..80: note = Synthetic: >MK720945_3-cand-0-79
  source 1..80: mol_type = other DNA
ggctaatttttggttggccatcagaggaagtttttaagattttagatgctaattttgccttttctatcttttgtatactt

SEQ ID NO: 21145 - DNA, 80 bp, synthetic construct
  misc_feature 1..80: note = Synthetic: >MK720945_3-cand-150-229
  source 1..80: mol_type = other DNA
tcggacagctttatattacttctttctaccgacaattgttttaagttgctaggtttcaactttacaaaatgcggatttta

SEQ ID NO: 21146 - DNA, 80 bp, synthetic construct
  misc_feature 1..80: note = Synthetic: >MK720945_4-cand-160-239
  source 1..80: mol_type = other DNA
actgatgttgtaaacctggattgtccttttactttagacagcttaaataactatctgtcttttggttcaatctgtttttc

SEQ ID NO: 21147 - DNA, 80 bp, synthetic construct
  misc_feature 1..80: note = Synthetic: >MK720945_5-cand-0-79
  source 1..80: mol_type = other DNA
cgtttatcagaataggattgttggtgtgatgactgcatcagctaatgagagcttcggttttgataatgtaactgagacgc

SEQ ID NO: 21148 - DNA, 80 bp, synthetic construct
  misc_feature 1..80: note = Synthetic: >MK720945_5-cand-100-179
  source 1..80: mol_type = other DNA
aatggttcaacacagtgtaaaaatcctgtgttgacctatggtagtgtgggtgtttgtccagatggttctctcgtggttgt

SEQ ID NO: 21149 - DNA, 80 bp, synthetic construct
  misc_feature 1..80: note = Synthetic: >MK720945_5-cand-200-279
  source 1..80: mol_type = other DNA
caacacctgtgtcaccaattgttactggcaacatcacagtgcctagcaatttcactgtgtcagtgcaagttgagtaccta

SEQ ID NO: 21150 - DNA, 80 bp, synthetic construct
  misc_feature 1..80: note = Synthetic: >MK720945_5-cand-300-379
  source 1..80: mol_type = other DNA
ctctgttgactgtaacatgtacgtttgtggtggtaacccacattgtcttaggttgctgtctcaatatgcatctgcatgcc

SEQ ID NO: 21151 - DNA, 80 bp, synthetic construct
  misc_feature 1..80: note = Synthetic: >MK720945_6-cand-0-79
  source 1..80: mol_type = other DNA
tcaccactgccaaatggacttgaggttgtgactgagagtgcttcaaaacctaactcacgcagccagagcagcaatcgtga

SEQ ID NO: 21152 - DNA, 80 bp, synthetic construct
  misc_feature 1..80: note = Synthetic: >MK720945_6-cand-100-179
  source 1..80: mol_type = other DNA
gatcacagtcgcggggtccttctgaaaaccagaatcaaaataggtcacgtaactcctcaaagagccgaggccaaaaccaa

SEQ ID NO: 21153 - DNA, 80 bp, synthetic construct
  misc_feature 1..80: note = Synthetic: >MK720945_6-cand-340-419
  source 1..80: mol_type = other DNA
ctgaatggaagcgagtccccacaactgctgagaatgtcacggtttgctttggtccacgcgatactaatcgcaactttggt

SEQ ID NO: 21154 - DNA, 80 bp, synthetic construct
  misc_feature 1..80: note = Synthetic: >MK720945_6-cand-440-519
  source 1..80: mol_type = other DNA
tggcacacaagcaaaacactacccgcagttagctgagctggttcctacaccagctgcattgctatttggtggtgaagtga

SEQ ID NO: 21155 - DNA, 80 bp, synthetic construct
  misc_feature 1..80: note = Synthetic: >MK720945_7-cand-0-79
  source 1..80: mol_type = other DNA
tgctggattaatgcaatttgtatacaattgcaaaaggcaaaagttgtctttaaaacagaaggacttcaggcgatgtggaa

SEQ ID NO: 21156 - DNA, 80 bp, synthetic construct
  misc_feature 1..80: note = Synthetic: >MK720945_7-cand-110-189
  source 1..80: mol_type = other DNA
tgttcattggctttattggtatcaaaatgctaacaaaggtgaaccaggtgatgttgagtacacattgaacaccatatcac

SEQ ID NO: 21157 - DNA, 80 bp, synthetic construct
  misc_feature 1..80: note = Synthetic: >MK720945_7-cand-350-429
  source 1..80: mol_type = other DNA
tgtcgagtctgttgtaggtactgttattttaaccacacccactagaccaactgcacacccagcaaatatgctactttctg

SEQ ID NO: 21158 - DNA, 80 bp, synthetic construct
  misc_feature 1..80: note = Synthetic: >MK720945_7-cand-460-539
  source 1..80: mol_type = other DNA
ttagagacggtcattacacagtttactcttatggtaaagtgtatgacggagacagtgttagtggtggtaatgatttatca

SEQ ID NO: 21159 - DNA, 80 bp, synthetic construct
  misc_feature 1..80: note = Synthetic: >MK720945_8-cand-0-79
  source 1..80: mol_type = other DNA
aataactcacccaatgacctggctctttatgcttttcatagcaataatgggggctacttctaccttcgtatctgtaagtg

SEQ ID NO: 21160 - DNA, 80 bp, synthetic construct
  misc_feature 1..80: note = Synthetic: >MK720945_8-cand-90-169
  source 1..80: mol_type = other DNA
ggccttaattgggtaacacaacaaactagtggtgcatgtgttgttaaccgtaaatttaggtttgtttttgcacatgcaca

SEQ ID NO: 21161 - DNA, 80 bp, synthetic construct
  misc_feature 1..80: note = Synthetic: >MK720945_8-cand-180-259
  source 1..80: mol_type = other DNA
ataggtttgacatggtcttctaatgttgtcactttttatggtgtacgtaatgtgtatagatattatgtacacaataagtg

SEQ ID NO: 21162 - DNA, 80 bp, synthetic construct
  misc_feature 1..80: note = Synthetic: >MK720945_8-cand-270-349
  source 1..80: mol_type = other DNA
gatgttaggtgtgaacttgcaccaacttgtgcaataaaccctgtcaactctactacaacttttaatgtgactacgaatgg

SEQ ID NO: 21163 - DNA, 80 bp, synthetic construct
  misc_feature 1..80: note = Synthetic: >MK720945_8-cand-360-439
  source 1..80: mol_type = other DNA
atcagttcctatagcgtgtgtgatgtgtgtgatggtttcccactccatatatttccagtattggaagggggttacatacc

SEQ ID NO: 21164 - DNA, 80 bp, synthetic construct
  misc_feature 1..80: note = Synthetic: >MK720945_8-cand-450-529
  source 1..80: mol_type = other DNA
cgtatggataattggtatgtgctatccaacacatccacaatacttgatggtcgtgttgttatgcaacaacctttgttagt

SEQ ID NO: 21165 - DNA, 80 bp, synthetic construct
  misc_feature 1..80: note = Synthetic: >MK720945_8-cand-540-619
  source 1..80: mol_type = other DNA
tggccagtgccttcattgctggttaatgatgaccccatttattttaacatgtcactaaataatggtgttaagtgtaatgg

SEQ ID NO: 21166 - DNA, 80 bp, synthetic construct
  misc_feature 1..80: note = Synthetic: >MK720945_8-cand-630-709
  source 1..80: mol_type = other DNA
acaaaggacgtctcgcacctacgttttgcgctcaattttactgaacagcaagtgctcaatggtgtgcacaacattaactt

SEQ ID NO: 21167 - DNA, 80 bp, synthetic construct
  misc_feature 1..80: note = Synthetic: >MK720945_9-cand-0-79
  source 1..80: mol_type = other DNA
aagaccagtaaagttaagtcaaaaaggcttgagtcttctgatgccaatttggtgttggttgacactgctgtcccattagt

SEQ ID NO: 21168 - DNA, 80 bp, synthetic construct
  misc_feature 1..80: note = Synthetic: >MK720945_9-cand-90-169
  source 1..80: mol_type = other DNA
gtttctaagattataggaggcttgtcattcttttgtagtggtggtcactatagattgatgagtgactgtgatacagttct

SEQ ID NO: 21169 - DNA, 80 bp, synthetic construct
  misc_feature 1..80: note = Synthetic: >MK720945_9-cand-180-259
  source 1..80: mol_type = other DNA
gttttttgtgctgctgagaactgtacacctgtgtttgagtgtgctgtacctaaaggttttgtgcctcctgtggcaactaa

SEQ ID NO: 21170 - DNA, 80 bp, synthetic construct
  misc_feature 1..80: note = Synthetic: >MK720945_9-cand-270-349
  source 1..80: mol_type = other DNA
ttagttactgccacagttacacaactgctcaagcttaacacaccatacaaagtgtatgatgttaaggttgttaatgagca

SEQ ID NO: 21171 - DNA, 80 bp, synthetic construct
  misc_feature 1..80: note = Synthetic: >MK720945_9-cand-360-439
  source 1..80: mol_type = other DNA
acctgcaactactcctttagagcaccttcttatattgcagattcggaggcttttattaaggcttgtattgagtgtgttga

SEQ ID NO: 21172 - DNA, 80 bp, synthetic construct
  misc_feature 1..80: note = Synthetic: >MK720945_9-cand-450-529
  source 1..80: mol_type = other DNA
tttgattcattttatgttaatgcacatagtgcaagtgctcttacagcctttgatccatgcttttccaatttcgaacaatt

SEQ ID NO: 21173 - DNA, 80 bp, synthetic construct
  misc_feature 1..80: note = Synthetic: >MK720945_9-cand-540-619
  source 1..80: mol_type = other DNA
gtgacatgtcccccactgttagaggatgtggatggtggtactatatggacttcttttattaaaactgtttgtaatgctgc

SEQ ID NO: 21174 - DNA, 80 bp, synthetic construct
  misc_feature 1..80: note = Synthetic: >MK720945_9-cand-630-709
  source 1..80: mol_type = other DNA
aagtctcttgttgttagttttgactttagtggcattgtcattaagactacaaagcgtttcaagcgatttgctgctgcact

SEQ ID NO: 21175 - DNA, 80 bp, synthetic construct
  misc_feature 1..80: note = Synthetic: >MK720945_9-cand-720-799
  source 1..80: mol_type = other DNA
tatagggagttcatagccactgttactaaatccattaaaataggtggtgtgacttttgcttactatgcttttacagtgcc

SEQ ID NO: 21176 - DNA, 80 bp, synthetic construct
  misc_feature 1..80: note = Synthetic: >MK720945_9-cand-770-849
  source 1..80: mol_type = other DNA
gacttttgcttactatgcttttacagtgccaaaaatctttgtttctggtgttttgcacaatgtcaggcgcgttgatgctc

SEQ ID NO: 21177 - DNA, 80 bp, synthetic construct
  misc_feature 1..80: note = Synthetic: >MK720945_9-cand-860-939
  source 1..80: mol_type = other DNA
tatgcctattgaagacatattggttgagttcaatgtttttgatggtgctactatgctagtgacacctaccaaggtggaac

SEQ ID NO: 21178 - DNA, 80 bp, synthetic construct; identical to SEQ ID NO: 21143
  misc_feature 1..80: note = Synthetic: >MK720946_2-cand-40-119
  source 1..80: mol_type = other DNA

SEQ ID NO: 21179 - DNA, 80 bp, synthetic construct; identical to SEQ ID NO: 21144
  misc_feature 1..80: note = Synthetic: >MK720946_3-cand-0-79
  source 1..80: mol_type = other DNA

SEQ ID NO: 21180 - DNA, 80 bp, synthetic construct; identical to SEQ ID NO: 21145
  misc_feature 1..80: note = Synthetic: >MK720946_3-cand-150-229
  source 1..80: mol_type = other DNA

SEQ ID NO: 21181 - DNA, 80 bp, synthetic construct; identical to SEQ ID NO: 21146
  misc_feature 1..80: note = Synthetic: >MK720946_4-cand-160-239
  source 1..80: mol_type = other DNA

SEQ ID NO: 21182 - DNA, 80 bp, synthetic construct; identical to SEQ ID NO: 21147
  misc_feature 1..80: note = Synthetic: >MK720946_5-cand-0-79
  source 1..80: mol_type = other DNA

SEQ ID NO: 21183 - DNA, 80 bp, synthetic construct; identical to SEQ ID NO: 21148
  misc_feature 1..80: note = Synthetic: >MK720946_5-cand-100-179
  source 1..80: mol_type = other DNA

SEQ ID NO: 21184 - DNA, 80 bp, synthetic construct; identical to SEQ ID NO: 21149
  misc_feature 1..80: note = Synthetic: >MK720946_5-cand-200-279
  source 1..80: mol_type = other DNA

SEQ ID NO: 21185 - DNA, 80 bp, synthetic construct; identical to SEQ ID NO: 21150
  misc_feature 1..80: note = Synthetic: >MK720946_5-cand-300-379
  source 1..80: mol_type = other DNA

SEQ ID NO: 21186 - DNA, 80 bp, synthetic construct; identical to SEQ ID NO: 21151
  misc_feature 1..80: note = Synthetic: >MK720946_6-cand-0-79
  source 1..80: mol_type = other DNA

SEQ ID NO: 21187 - DNA, 80 bp, synthetic construct; identical to SEQ ID NO: 21152
  misc_feature 1..80: note = Synthetic: >MK720946_6-cand-100-179
  source 1..80: mol_type = other DNA

SEQ ID NO: 21188 - DNA, 80 bp, synthetic construct; identical to SEQ ID NO: 21153
  misc_feature 1..80: note = Synthetic: >MK720946_6-cand-340-419
  source 1..80: mol_type = other DNA

SEQ ID NO: 21189 - DNA, 80 bp, synthetic construct; identical to SEQ ID NO: 21154
  misc_feature 1..80: note = Synthetic: >MK720946_6-cand-440-519
  source 1..80: mol_type = other DNA

SEQ ID NO: 21190 - DNA, 80 bp, synthetic construct; identical to SEQ ID NO: 21155
  misc_feature 1..80: note = Synthetic: >MK720946_7-cand-0-79
  source 1..80: mol_type = other DNA

SEQ ID NO: 21191 - DNA, 80 bp, synthetic construct; identical to SEQ ID NO: 21156
  misc_feature 1..80: note = Synthetic: >MK720946_7-cand-110-189
  source 1..80: mol_type = other DNA

SEQ ID NO: 21192 - DNA, 80 bp, synthetic construct; identical to SEQ ID NO: 21157
  misc_feature 1..80: note = Synthetic: >MK720946_7-cand-350-429
  source 1..80: mol_type = other DNA

SEQ ID NO: 21193 - DNA, 80 bp, synthetic construct; identical to SEQ ID NO: 21158
  misc_feature 1..80: note = Synthetic: >MK720946_7-cand-460-539
  source 1..80: mol_type = other DNA

SEQ ID NO: 21194 - DNA, 80 bp, synthetic construct; identical to SEQ ID NO: 21159
  misc_feature 1..80: note = Synthetic: >MK720946_8-cand-0-79
  source 1..80: mol_type = other DNA

SEQ ID NO: 21195 - DNA, 80 bp, synthetic construct; identical to SEQ ID NO: 21160
  misc_feature 1..80: note = Synthetic: >MK720946_8-cand-90-169
  source 1..80: mol_type = other DNA

SEQ ID NO: 21196 - DNA, 80 bp, synthetic construct; identical to SEQ ID NO: 21161
  misc_feature 1..80: note = Synthetic: >MK720946_8-cand-180-259
  source 1..80: mol_type = other DNA

SEQ ID NO: 21197 - DNA, 80 bp, synthetic construct; identical to SEQ ID NO: 21162
  misc_feature 1..80: note = Synthetic: >MK720946_8-cand-270-349
  source 1..80: mol_type = other DNA

SEQ ID NO: 21198 - DNA, 80 bp, synthetic construct; identical to SEQ ID NO: 21163
  misc_feature 1..80: note = Synthetic: >MK720946_8-cand-360-439
  source 1..80: mol_type = other DNA

SEQ ID NO: 21199 - DNA, 80 bp, synthetic construct; identical to SEQ ID NO: 21164
  misc_feature 1..80: note = Synthetic: >MK720946_8-cand-450-529
  source 1..80: mol_type = other DNA

SEQ ID NO: 21200 - DNA, 80 bp, synthetic construct; identical to SEQ ID NO: 21165
  misc_feature 1..80: note = Synthetic: >MK720946_8-cand-540-619
  source 1..80: mol_type = other DNA

SEQ ID NO: 21201 - DNA, 80 bp, synthetic construct; identical to SEQ ID NO: 21166
  misc_feature 1..80: note = Synthetic: >MK720946_8-cand-630-709
  source 1..80: mol_type = other DNA

SEQ ID NO: 21202 - DNA, 80 bp, synthetic construct; identical to SEQ ID NO: 21167
  misc_feature 1..80: note = Synthetic: >MK720946_9-cand-0-79
  source 1..80: mol_type = other DNA

SEQ ID NO: 21203 - DNA, 80 bp, synthetic construct; identical to SEQ ID NO: 21168
  misc_feature 1..80: note = Synthetic: >MK720946_9-cand-90-169
  source 1..80: mol_type = other DNA

SEQ ID NO: 21204 - DNA, 80 bp, synthetic construct; identical to SEQ ID NO: 21169
  misc_feature 1..80: note = Synthetic: >MK720946_9-cand-180-259
  source 1..80: mol_type = other DNA

SEQ ID NO: 21205 - DNA, 80 bp, synthetic construct; identical to SEQ ID NO: 21170
  misc_feature 1..80: note = Synthetic: >MK720946_9-cand-270-349
  source 1..80: mol_type = other DNA

SEQ ID NO: 21206 - DNA, 80 bp, synthetic construct; identical to SEQ ID NO: 21171
  misc_feature 1..80: note = Synthetic: >MK720946_9-cand-360-439
  source 1..80: mol_type = other DNA

SEQ ID NO: 21207 - DNA, 80 bp, synthetic construct; identical to SEQ ID NO: 21172
  misc_feature 1..80: note = Synthetic: >MK720946_9-cand-450-529
  source 1..80: mol_type = other DNA

SEQ ID NO: 21208 - DNA, 80 bp, synthetic construct; identical to SEQ ID NO: 21173
  misc_feature 1..80: note = Synthetic: >MK720946_9-cand-540-619
  source 1..80: mol_type = other DNA

SEQ ID NO: 21209 - DNA, 80 bp, synthetic construct; identical to SEQ ID NO: 21174
  misc_feature 1..80: note = Synthetic: >MK720946_9-cand-630-709
  source 1..80: mol_type = other DNA

SEQ ID NO: 21210 - DNA, 80 bp, synthetic construct; identical to SEQ ID NO: 21175
  misc_feature 1..80: note = Synthetic: >MK720946_9-cand-720-799
  source 1..80: mol_type = other DNA

SEQ ID NO: 21211 - DNA, 80 bp, synthetic construct; identical to SEQ ID NO: 21176
  misc_feature 1..80: note = Synthetic: >MK720946_9-cand-770-849
  source 1..80: mol_type = other DNA

SEQ ID NO: 21212 - DNA, 80 bp, synthetic construct; identical to SEQ ID NO: 21177
  misc_feature 1..80: note = Synthetic: >MK720946_9-cand-860-939
  source 1..80: mol_type = other DNA

SEQ ID NO: 21213 - DNA, 80 bp, synthetic construct
  misc_feature 1..80: note = Synthetic: >MK907286_1-cand-0-79
  source 1..80: mol_type = other DNA
ttcgcgaaagacccatgtatgaatgcaacgattttcgtggcatacctgatttttcagcttttgttgatgacttgcaggaa

SEQ ID NO: 21214 - DNA, 80 bp, synthetic construct
  misc_feature 1..80: note = Synthetic: >MK907286_1-cand-150-229
  source 1..80: mol_type = other DNA
agtatatgtgtggatttgacggtcagcccgttaaagcctacttgtcattggtcaccaaagaaggtttaaccactttgtct

SEQ ID NO: 21215 - DNA, 80 bp, synthetic construct
  misc_feature 1..80: note = Synthetic: >MK907286_1-cand-220-299
  source 1..80: mol_type = other DNA
cactttgtctgacattgaagccgatgtacgttcacgtgtggacaaacaggggtttctaatttttaaaggaaaaacttata

SEQ ID NO: 21216 - DNA, 80 bp, synthetic construct
  misc_feature 1..80: note = Synthetic: >MK907286_2-cand-0-79
  source 1..80: mol_type = other DNA
cttgggcttcaattgtagatgctgtttttccaatagatgagacagatgttaatgaccaacaacaaaatgatgttgtacaa

SEQ ID NO: 21217 - DNA, 80 bp, synthetic construct
  misc_feature 1..80: note = Synthetic: >MK907286_2-cand-120-199
  source 1..80: mol_type = other DNA
aaaaccaagaggatgtaaaaccgaaaggagatgcaccgcctgttgatctcactcctaaaaaagcaactgttgaggctaaa

SEQ ID NO: 21218 - DNA, 80 bp, synthetic construct
  misc_feature 1..80: note = Synthetic: >MK907286_2-cand-240-319
  source 1..80: mol_type = other DNA
gtgtcaacccagagttgccatcttcaactggtttaaaaagtcatgaggatgcagaattaaaagacgttgcatcttctgtt

SEQ ID NO: 21219 - DNA, 80 bp, synthetic construct
  misc_feature 1..80: note = Synthetic: >MK907286_2-cand-290-369
  source 1..80: mol_type = other DNA
gcagaattaaaagacgttgcatcttctgttgaacaggtttttaataagttggaacctgaaaaacaggtaagagagcatgt

SEQ ID NO: 21220 - DNA, 80 bp, synthetic construct
  misc_feature 1..80: note = Synthetic: >MK907286_3-cand-0-79
  source 1..80: mol_type = other DNA
tgctgaattgcgtacaactttcggcagcatcattgtatttcgcatcgcagagtgtcactactagagcctttgttatgcta

SEQ ID NO: 21221 - DNA, 80 bp, synthetic construct
  misc_feature 1..80: note = Synthetic: >MK907286_3-cand-350-429
  source 1..80: mol_type = other DNA
atttttgagggtaaagatgcactagtctttccctccggcacatatcattgtgtcacggcccctggtagtgttgtgggtgc

SEQ ID NO: 21222 - DNA, 80 bp, synthetic construct; identical to SEQ ID NO: 21213
  misc_feature 1..80: note = Synthetic: >MK907287_1-cand-0-79
  source 1..80: mol_type = other DNA

SEQ ID NO: 21223 - DNA, 80 bp, synthetic construct; identical to SEQ ID NO: 21214
  misc_feature 1..80: note = Synthetic: >MK907287_1-cand-150-229
  source 1..80: mol_type = other DNA

SEQ ID NO: 21224 - DNA, 80 bp, synthetic construct; identical to SEQ ID NO: 21215
  misc_feature 1..80: note = Synthetic: >MK907287_1-cand-220-299
  source 1..80: mol_type = other DNA

SEQ ID NO: 21225 - DNA, 80 bp, synthetic construct; identical to SEQ ID NO: 21220
  misc_feature 1..80: note = Synthetic: >MK907287_2-cand-0-79
  source 1..80: mol_type = other DNA

SEQ ID NO: 21226 - DNA, 80 bp, synthetic construct; identical to SEQ ID NO: 21221
  misc_feature 1..80: note = Synthetic: >MK907287_2-cand-350-429
  source 1..80: mol_type = other DNA

SEQ ID NO: 21227 - DNA, 80 bp, synthetic construct
  misc_feature 1..80: note = Synthetic: >MN165107_1-cand-20-99
  source 1..80: mol_type = other DNA
ctagcgtaggtaagaggtctgctattgaagatctattgttcaataaggttgtaactagtggtcttggcactgtggatgat

SEQ ID NO: 21228 - DNA, 80 bp, synthetic construct
  misc_feature 1..80: note = Synthetic: >MN165107_2-cand-0-79
  source 1..80: mol_type = other DNA
tttgcagttagaggagtgtcgtagtgattattgtgctggttacgttaagaatgtctttgtgccaattgatggcaagatac

SEQ ID NO: 21229 - DNA, 80 bp, synthetic construct
  misc_feature 1..80: note = Synthetic: >MN165107_3-cand-0-79
  source 1..80: mol_type = other DNA
cgtacttccaccaactgttcgagagtttgcatttggcagagatggatccatttttgttaatggctataaatattttagtc

SEQ ID NO: 21230 - DNA, 80 bp, synthetic construct
  misc_feature 1..80: note = Synthetic: >MN165107_3-cand-80-159
  source 1..80: mol_type = other DNA
tgccacctatcaaaagtgttaacttttccatcagttcagttgaaaactatggcttttggaccatagcatacaccaactat

SEQ ID NO: 21231 - DNA, 80 bp, synthetic construct
  misc_feature 1..80: note = Synthetic: >MN165107_3-cand-170-249
  source 1..80: mol_type = other DNA
tggtggatgttaatggcactggtatcactagattattctattgtgactcacctctcaataggattaagtgtcaacaactg

SEQ ID NO: 21232 - DNA, 80 bp, synthetic construct
  misc_feature 1..80: note = Synthetic: >MN165107_3-cand-230-309
  source 1..80: mol_type = other DNA
ggattaagtgtcaacaactgaagcatgaactaccagatgggttttattccgctagtatgcttgttaaaaaggatctacct

SEQ ID NO: 21233 - DNA, 80 bp, synthetic construct
  misc_feature 1..80: note = Synthetic: >MN165107_3-cand-320-399
  source 1..80: mol_type = other DNA
ttactatgccacagttttacaactggatgcatgtcactttacatgtcgtattaaatgacacagagaaaggtagcaacatc

SEQ ID NO: 21234 - DNA, 80 bp, synthetic construct
  misc_feature 1..80: note = Synthetic: >MN165107_3-cand-410-489
  source 1..80: mol_type = other DNA
aagcttctgagctagcattacttgctgacatacactttgagatagcacaggcgaatggaagtgtaactaatgttactagt

SEQ ID NO: 21235 - DNA, 80 bp, synthetic construct
  misc_feature 1..80: note = Synthetic: >MN165107_3-cand-500-579
  source 1..80: mol_type = other DNA
aaacaagacagttggctctattttataagtacactagcttacaaggcttgtatacctattctaatctggtggagctacaa

SEQ ID NO: 21236 - DNA, 80 bp, synthetic construct
  misc_feature 1..80: note = Synthetic: >MN165107_3-cand-680-759
  source 1..80: mol_type = other DNA
cgttagtccatggtaacaggtggcgtacacagttcgccactattacagtttcttacaaggatggttctatgattacaact

SEQ ID NO: 21237 - DNA, 80 bp, synthetic construct
  misc_feature 1..80: note = Synthetic: >MN306036_1-cand-40-119
  source 1..80: mol_type = other DNA
gcatacatttagaggctatgtttatgcatggctatcgtattatgttccatcagttgagtacacttatactgatgaagtta

SEQ ID NO: 21238 - DNA, 80 bp, synthetic construct
  misc_feature 1..80: note = Synthetic: >MN306036_3-cand-210-289
  source 1..80: mol_type = other DNA
actggactctttaagagttacttttattgatggcctttcttgttttaagattggacgtagaagaatttgtctttcaggca

SEQ ID NO: 21239 - DNA, 80 bp, synthetic construct; identical to SEQ ID NO: 21238
  misc_feature 1..80: note = Synthetic: >MN306041_2-cand-210-289
  source 1..80: mol_type = other DNA

SEQ ID NO: 21240 - DNA, 80 bp, synthetic construct; identical to SEQ ID NO: 21238
  misc_feature 1..80: note = Synthetic: >MN306042_2-cand-210-289
  source 1..80: mol_type = other DNA

SEQ ID NO: 21241 - DNA, 80 bp, synthetic construct; identical to SEQ ID NO: 21238
  misc_feature 1..80: note = Synthetic: >MN306053_2-cand-210-289
  source 1..80: mol_type = other DNA

SEQ ID NO: 21242 - DNA, 80 bp, synthetic construct; identical to SEQ ID NO: 21238
  misc_feature 1..80: note = Synthetic: >MN310478_2-cand-210-289
  source 1..80: mol_type = other DNA

SEQ ID NO: 21243 - DNA, 80 bp, synthetic construct
  misc_feature 1..80: note = Synthetic: >MN514962_2-cand-0-79
  source 1..80: mol_type = other DNA
ggagtctttaggtgcagctatatattatttgaattttaaaattgttgatttggctcaacattttagtgactttggaacaa

SEQ ID NO: 21244 - DNA, 80 bp, synthetic construct
  misc_feature 1..80: note = Synthetic: >MN514964_1-cand-40-119
  source 1..80: mol_type = other DNA
ttggaggttgtgtgtattggagtccagcatgtaatatatggattcctatattaaaatcttctgttaagtcttatgacggt

SEQ ID NO: 21245 - DNA, 80 bp, synthetic construct; identical to SEQ ID NO: 21244
  misc_feature 1..80: note = Synthetic: >MN514965_1-cand-40-119
  source 1..80: mol_type = other DNA

SEQ ID NO: 21246 - DNA, 80 bp, synthetic construct; identical to SEQ ID NO: 21244
  misc_feature 1..80: note = Synthetic: >MN514967_1-cand-40-119
  source 1..80: mol_type = other DNA

SEQ ID NO: 21247 - DNA, 80 bp, synthetic construct
  misc_feature 1..80: note = Synthetic: >MN514967_3-cand-60-139
  source 1..80: mol_type = other DNA
gtgttgccagtgaacaggaggattcttctgaaatcttagaggacactttggatggtggtccatgtgtggagacatctgat

SEQ ID NO: 21248 - DNA, 80 bp, synthetic construct
  misc_feature 1..80: note = Synthetic: >MN611517_1-cand-20-99
  source 1..80: mol_type = other DNA
tattctgctaattttctagacaacaaagagttgcctagtacattagttacattgccagtgcattatcaacatactgcagt

SEQ ID NO: 21249 - DNA, 80 bp, synthetic construct
  misc_feature 1..80: note = Synthetic: >MN611517_2-cand-160-239
  source 1..80: mol_type = other DNA
cctcagtctcgcaatgcctctaatgagcgcttaccaaagtctaatagcaagcaaagcaaccaggatgatatcatggccgt

SEQ ID NO: 21250 - DNA, 80 bp, synthetic construct
  misc_feature 1..80: note = Synthetic: >MN611517_3-cand-0-79
  source 1..80: mol_type = other DNA
cagcacccaattgtacctactctcaacccagttgctccagaattcaaccctacttcgtctcagccgaaacctgagccaat

SEQ ID NO: 21251 - DNA, 80 bp, synthetic construct
  misc_feature 1..80: note = Synthetic: >MN611517_3-cand-130-209
  source 1..80: mol_type = other DNA
acaactatgcgatggtttttaccgttgttgcttgttgttagttgcagtgctaaagtggttgtttactcttctcaacacac

SEQ ID NO: 21252 - DNA, 80 bp, synthetic construct
  misc_feature 1..80: note = Synthetic: >MN611517_3-cand-180-259
  source 1..80: mol_type = other DNA
taaagtggttgtttactcttctcaacacactcctgtgtgtggtcaagaccattgcatgatggcatgctcagctctgcatt

SEQ ID NO: 21253 - DNA, 80 bp, synthetic construct
  misc_feature 1..80: note = Synthetic: >MN611517_4-cand-0-79
  source 1..80: mol_type = other DNA
agtttactgatgtacatggtgtgtttgttggttactatgatagtggtttacgtagctattttggtctcggtactcatcct

SEQ ID NO: 21254 - DNA, 80 bp, synthetic construct
  misc_feature 1..80: note = Synthetic: >MN611517_4-cand-130-209
  source 1..80: mol_type = other DNA
tggttggttttatttgaaagtttgcaaatatgcacaagctcaagttcctggcactggtaacgctggcacttattgtcttg

SEQ ID NO: 21255 - DNA, 80 bp, synthetic construct
  misc_feature 1..80: note = Synthetic: >MN611518_1-cand-40-119
  source 1..80: mol_type = other DNA
tgattcctcaaacgtgtgctgcttatttgcggctttgtaaaccaaatttttctgatcttcttgctgcgcagctgctcatt

SEQ ID NO: 21256 - DNA, 80 bp, synthetic construct
  misc_feature 1..80: note = Synthetic: >MN611518_2-cand-230-309
  source 1..80: mol_type = other DNA
aaccttttatgtccctggtgctgagttttgggatgtagtgtccattcgttgtaagaataaaggtgcttgtgctcaccagg

SEQ ID NO: 21257 - DNA, 80 bp, synthetic construct
  misc_feature 1..80: note = Synthetic: >MN611518_2-cand-330-409
  source 1..80: mol_type = other DNA
gttatagtttctactaatgggcgtggtcttattagtaattatactttgtgttctaattgcagtggcttcccacaacatgt

SEQ ID NO: 21258 - DNA, 80 bp, synthetic construct
  misc_feature 1..80: note = Synthetic: >MN611521_2-cand-0-79
  source 1..80: mol_type = other DNA
tgacaggtttgagacagactgcccattcacacatagcacattaaataattacttgtcgtttagtactctgtgtttttcca

SEQ ID NO: 21259 - DNA, 80 bp, synthetic construct
  misc_feature 1..80: note = Synthetic: >MN611521_2-cand-410-489
  source 1..80: mol_type = other DNA
gtagttatgcacaacaggctgcatttattcaaaacaagattgtcggtgttatgagtagtgtgtccagttctaatttcact

SEQ ID NO: 21260 - DNA, 80 bp, synthetic construct
  misc_feature 1..80: note = Synthetic: >MN611521_3-cand-0-79
  source 1..80: mol_type = other DNA
tgccaggctatttaccggttccagacaattggaccacaaaccctaatcacagaaatgttgtgtttggaccgaacccaccc

SEQ ID NO: 21261 - DNA, 80 bp, synthetic construct
  misc_feature 1..80: note = Synthetic: >MN611521_3-cand-210-289
  source 1..80: mol_type = other DNA
ggtccattaggatttgtaaatggaccactgttaaaaacttgggacaacccacctatgaacatactggaaccagctgtatt

SEQ ID NO: 21262 - DNA, 80 bp, synthetic construct
  misc_feature 1..80: note = Synthetic: >MN611521_3-cand-310-389
  source 1..80: mol_type = other DNA
tcaacaattcccaaaaggttccattataggtgtcagctgggttggtaacactgtcacagtgcatgatagggttagaatgc

SEQ ID NO: 21263 - DNA, 80 bp, synthetic construct
  misc_feature 1..80: note = Synthetic: >MN611522_1-cand-140-219
  source 1..80: mol_type = other DNA
gccatcagcggccgattcctgtacgttggatattatgcaatttgctatcgtagctttgcatttattcttcacaatgttac

SEQ ID NO: 21264 - DNA, 80 bp, synthetic construct
  misc_feature 1..80: note = Synthetic: >MN611522_1-cand-240-319
  source 1..80: mol_type = other DNA
gtgtcacatgtccatattcctgtgtgaccaaatttgcggactatgtggcattctatggtggccatcattacattagtatt

SEQ ID NO: 21265 - DNA, 80 bp, synthetic construct
  misc_feature 1..80: note = Synthetic: >MN611522_1-cand-340-419
  source 1..80: mol_type = other DNA
tgtacaccgtgactccttgtatgtggctattagaggccgtaaggagatgaatttgtacctatctaaggccttggagcttt

SEQ ID NO: 21266 - DNA, 80 bp, synthetic construct
  misc_feature 1..80: note = Synthetic: >MN611522_1-cand-440-519
  source 1..80: mol_type = other DNA
ttattcaccaacgcacctattgttggtgtttataatactagctttgagatgcaggaatctcaactaaaccatgtttttga

SEQ ID NO: 21267 - DNA, 80 bp, synthetic construct
  misc_feature 1..80: note = Synthetic: >MN611522_2-cand-0-79
  source 1..80: mol_type = other DNA
atagctgattttgtttctagcggtgcctatgtgtgccaggccaatccaagagccccccaggtaggtgtctgtattacgta

SEQ ID NO: 21268 - DNA, 80 bp, synthetic construct
  misc_feature 1..80: note = Synthetic: >MN611522_2-cand-90-169
  source 1..80: mol_type = other DNA
aagaccacgtttcaaggtattctacattatagtaattacagcttttcacagttctataacatgttgtacgtgggttcaca

SEQ ID NO: 21269 - DNA, 80 bp, synthetic construct
  misc_feature 1..80: note = Synthetic: >MN611522_2-cand-180-259
  source 1..80: mol_type = other DNA
gttaggattttagggcaggtttatgaggtacagtcttgttttcaagcctcatatgacgtgctctattccagtgcttccac

SEQ ID NO: 21270 - DNA, 80 bp, synthetic construct
  misc_feature 1..80: note = Synthetic: >MN611522_2-cand-270-349
  source 1..80: mol_type = other DNA
ttatatcgtagttttgattgtagtcatctttatgcatttgcctcccgaactaggagttttgtaccccgctcgggaggcat

SEQ ID NO: 21271 - DNA, 80 bp, synthetic construct
  misc_feature 1..80: note = Synthetic: >MN611522_2-cand-460-539
  source 1..80: mol_type = other DNA
taagtgttaggcgtattgcctttgagagacatgacactacttatgttgcaccagttattaatgagaggtatattgaactt

SEQ ID NO: 21272 - DNA, 80 bp, synthetic construct
  misc_feature 1..80: note = Synthetic: >MN611522_2-cand-550-629
  source 1..80: mol_type = other DNA
atcagcttattatgactgagcaattcctgcagacatctatgccgaagtttagtgtgagctgtgaggcatatatatgtgat

SEQ ID NO: 21273 - DNA, 80 bp, synthetic construct
  misc_feature 1..80: note = Synthetic: >MN611522_2-cand-640-719
  source 1..80: mol_type = other DNA
cttgcaagaacctcctatttcgttatggtggtttctgccagaagattgagtctgatatcaggggtgcaggtgctttactt

SEQ ID NO: 21274 - DNA, 80 bp, synthetic construct
  misc_feature 1..80: note = Synthetic: >MN611522_3-cand-0-79
  source 1..80: mol_type = other DNA
tttggttacaactaaatgaaattcattattgctgcttgtcttttgcacctcgtttgtgggtgtgagtatgtggcgataga

SEQ ID NO: 21275 - DNA, 80 bp, synthetic construct
  misc_feature 1..80: note = Synthetic: >MN611522_3-cand-90-169
  source 1..80: mol_type = other DNA
cctgtgttctatacacctaagggccttgttaatggcactaccgttattagtggtgtttatccttcagttaataagtcaga

SEQ ID NO: 21276 - DNA, 80 bp, synthetic construct
  misc_feature 1..80: note = Synthetic: >MN611522_3-cand-160-239
  source 1..80: mol_type = other DNA
ataagtcagattggttttgtcctactgatgtggtgcggccatatggtcatggacgtggcatcgggcttttcattcagaca

SEQ ID NO: 21277 - DNA, 80 bp, synthetic construct
  misc_feature 1..80: note = Synthetic: >MN611522_3-cand-250-329
  source 1..80: mol_type = other DNA
ccagcgacgacacttatggcggttatacttttagtgtgacacctgaatatgtgacaaacttaacatgggctttatgggtg

SEQ ID NO: 21278 - DNA, 80 bp, synthetic construct
  misc_feature 1..80: note = Synthetic: >MN611522_3-cand-340-419
  source 1..80: mol_type = other DNA
ggggtattaattcgcccgttactgtgcgcttgtgccgctggagtaatactcttccctttaacattacttcacatacagat

SEQ ID NO: 21279 - DNA, 80 bp, synthetic construct
  misc_feature 1..80: note = Synthetic: >MN611522_3-cand-430-509
  source 1..80: mol_type = other DNA
ctacttttgctatagattgtttgattaatggcagttacccatcacattctggtaaggggtacactcttggcgtttcttgg

SEQ ID NO: 21280 - DNA, 80 bp, synthetic construct
  misc_feature 1..80: note = Synthetic: >MN611522_3-cand-520-599
  source 1..80: mol_type = other DNA
ttgtgcgcattgtgttccctccgacatcgtttgaaattcagcttgatgggctacagtggattaatgtgcagtttactagc

SEQ ID NO: 21281 - DNA, 80 bp, synthetic construct
  misc_feature 1..80: note = Synthetic: >MN611522_3-cand-720-799
  source 1..80: mol_type = other DNA
gagagtttacaatgtaagctcggacgctttgatgttgcaagtggtgtttattctaacagtgaggtcgagtatccaacagc

SEQ ID NO: 21282 - DNA, 80 bp, synthetic construct
  misc_feature 1..80: note = Synthetic: >MN611524_1-cand-40-119
  source 1..80: mol_type = other DNA
cataatgatgtttttggtcttagttggtctggtgacaggctgattctctaccttaaaaatggtattaaatcttattatgt

SEQ ID NO: 21283 - DNA, 80 bp, synthetic construct
  misc_feature 1..80: note = Synthetic: >MN611524_2-cand-0-79
  source 1..80: mol_type = other DNA
gagatctttaaagatcttgtgtctggtgtgtttgaccttgttgttgaacactttaaaattgccaacaagaaattcaagcg

SEQ ID NO: 21284 - DNA, 80 bp, synthetic construct
  misc_feature 1..80: note = Synthetic: >MN611524_2-cand-100-179
  source 1..80: mol_type = other DNA
tcgaaaatgcacttgcctgtcttgtcagtgcgaaagttaagggtgttaagcaggctggtcttaaaaagcttctctatgct

SEQ ID NO: 21285 - DNA, 80 bp, synthetic construct
  misc_feature 1..80: note = Synthetic: >MN611525_1-cand-40-119
  source 1..80: mol_type = other DNA
tttgacaagtctacttattgcaacaatgttgcttgtagaatttgtttgtatggttaccaggaactttctgattttcctca

SEQ ID NO: 21286 - DNA, 80 bp, synthetic construct
  misc_feature 1..80: note = Synthetic: >MN611525_10-cand-0-79
  source 1..80: mol_type = other DNA
atgtccagatttgttgaaagatattgacaatggtggcatttggtattcttttattgaaacagttagtgatgctttgtcat

SEQ ID NO: 21287 - DNA, 80 bp, synthetic construct
  misc_feature 1..80: note = Synthetic: >MN611525_10-cand-100-179
  source 1..80: mol_type = other DNA
gatttcggtttgagtggtatagttatcacagcaactaaacgtttcaagcgctttgctggtgttcttatgaacttgtatag

SEQ ID NO: 21288 - DNA, 80 bp, synthetic construct
  misc_feature 1..80: note = Synthetic: >MN611525_10-cand-150-229
  source 1..80: mol_type = other DNA
ctttgctggtgttcttatgaacttgtatagagagttcatagccagtgttacaactgttcttatgattggtgccaagaaat

SEQ ID NO: 21289 - DNA, 80 bp, synthetic construct
  misc_feature 1..80: note = Synthetic: >MN611525_10-cand-250-329
  source 1..80: mol_type = other DNA
aaaccaaaaatattgattgctggtgttttgcatcctgtgtttgtaaagcaggcttctgactgtagttgtgcggttgaaga

SEQ ID NO: 21290 - DNA, 80 bp, synthetic construct
  misc_feature 1..80: note = Synthetic: >MN611525_10-cand-350-429
  source 1..80: mol_type = other DNA
tgtttgcttgtggtgacattgagatacagcccacacgtgttgagtcgcatactgttgagctagaggaatgtgattttaca

SEQ ID NO: 21291 - DNA, 80 bp, synthetic construct
  misc_feature 1..80: note = Synthetic: >MN611525_10-cand-450-529
  source 1..80: mol_type = other DNA
gttggctgttgtaaatggttacacgttttacaacactggtgattattactatccttctaatgacaaatttgccatctcaa

SEQ ID NO: 21292 - DNA, 80 bp, synthetic construct
  misc_feature 1..80: note = Synthetic: >MN611525_10-cand-550-629
  source 1..80: mol_type = other DNA
ggtaaaagtgttcaattttctgctgatgtttctgttaaagagatcgagcctgtttataaggtttatcttgactttgaatt

SEQ ID NO: 21293 - DNA, 80 bp, synthetic construct
  misc_feature 1..80: note = Synthetic: >MN611525_11-cand-0-79
  source 1..80: mol_type = other DNA
acacgcaccagaacttttgcgtaaagcatacaatgctatcttgtcacagccaggtgtgcccttaacacctcttttgagtg

SEQ ID NO: 21294 - DNA, 80 bp, synthetic construct
  misc_feature 1..80: note = Synthetic: >MN611525_11-cand-90-169
  source 1..80: mol_type = other DNA
taaagtgcccatagtggagtctgttatggcactactagatgtggtgggtgataacactgttaagtgtttttgtcttaatg

SEQ ID NO: 21295 - DNA, 80 bp, synthetic construct
  misc_feature 1..80: note = Synthetic: >MN611525_11-cand-180-259
  source 1..80: mol_type = other DNA
tgaccagattaagcagtgtgtgtccacacttggtgtaatgactccgttggaagtgcctgagcagatagttgaagttagtg

SEQ ID NO: 21296 - DNA, 80 bp, synthetic construct
  misc_feature 1..80: note = Synthetic: >MN611525_11-cand-270-349
  source 1..80: mol_type = other DNA
gtctgaaaccgttgttgctgtacctaagccttttaggtgtgaaggtaagtttgagttttatgactcttctattgcagaac

SEQ ID NO: 21297 - DNA, 80 bp, synthetic construct
  misc_feature 1..80: note = Synthetic: >MN611525_11-cand-360-439
  source 1..80: mol_type = other DNA
tcaattagatcgttttgtgttctttactgatagcacatttacattttgttctgttgctaagtctttggacgcacactatg

SEQ ID NO: 21298 - DNA, 80 bp, synthetic construct
  misc_feature 1..80: note = Synthetic: >MN611525_11-cand-580-659
  source 1..80: mol_type = other DNA
gacaaaaatgttaaacgtttgtttgttaagttagctaaaataaagggttgcataatggccacaatcccttctactccttt

SEQ ID NO: 21299 - DNA, 80 bp, synthetic construct
  misc_feature 1..80: note = Synthetic: >MN611525_12-cand-0-79
  source 1..80: mol_type = other DNA
gtttgctaaagactttaacatgctttcagacgaaggtcgtaagtatgtagttaaaacagcaaaacttaaaggtgttaact

SEQ ID NO: 21300 - DNA, 80 bp, synthetic construct
  misc_feature 1..80: note = Synthetic: >MN611525_12-cand-100-179
  source 1..80: mol_type = other DNA
aaccgcatgcaaaccagcatccctattgttagtgttacaactaaatgtggttcaggtattaaacactgttataattgcct

SEQ ID NO: 21301 - DNA, 80 bp, synthetic construct
  misc_feature 1..80: note = Synthetic: >MN611525_12-cand-190-269
  source 1..80: mol_type = other DNA
tgtgtctttgttcttactggctttgttttgcttggttgtttggattatactactactattcagagtgatagtgattttgg

SEQ ID NO: 21302 - DNA, 80 bp, synthetic construct
  misc_feature 1..80: note = Synthetic: >MN611525_12-cand-280-359
  source 1..80: mol_type = other DNA
attgaaggtggcaagttatttaattttgaaacacctttaaagtgtgtgcataacacattttcaaattttgatgattggca

SEQ ID NO: 21303 - DNA, 80 bp, synthetic construct
  misc_feature 1..80: note = Synthetic: >MN611525_12-cand-370-449
  source 1..80: mol_type = other DNA
tttggttttgtacctataaaagataggagttgtccaattatagttggtgtttcaaacttggctcgtactattccaggtgt

SEQ ID NO: 21304 - DNA, 80 bp, synthetic construct
  misc_feature 1..80: note = Synthetic: >MN611525_12-cand-460-539
  source 1..80: mol_type = other DNA
gttttcttgtatggcaggacattgatttttgctatacaagcggtttttggtggttctaacacatgctatgactttactgg

SEQ ID NO: 21305 - DNA, 80 bp, synthetic construct
  misc_feature 1..80: note = Synthetic: >MN611525_12-cand-550-629
  source 1..80: mol_type = other DNA
tcagaacgctgtctatttaattcagcttgtactgtacttaatggcttgggcggtttacgtacttactgttacaaagacgg

SEQ ID NO: 21306 - DNA, 80 bp, synthetic construct
  misc_feature 1..80: note = Synthetic: >MN611525_12-cand-760-839
  source 1..80: mol_type = other DNA
caaacaacgtattgtaggatgggtgagtgtatagattccaaggagggggtttgcttcggctataaccgctttttggtata

SEQ ID NO: 21307 - DNA, 80 bp, synthetic construct
  misc_feature 1..80: note = Synthetic: >MN611525_12-cand-850-929
  source 1..80: mol_type = other DNA
tcaggtccagactttgtttgtggaacaggcttcttgtcacttttgtataatgtattgaccatgttttcgtcaacattttc

SEQ ID NO: 21308 - DNA, 80 bp, synthetic construct
  misc_feature 1..80: note = Synthetic: >MN611525_2-cand-40-119
  source 1..80: mol_type = other DNA
tctgtttgtggcgtattgtaaaagtgcagagtgttgatgactttgttgcctctggtaattttgatatcgaagaccacact

SEQ ID NO: 21309 - DNA, 80 bp, synthetic construct
  misc_feature 1..80: note = Synthetic: >MN611525_3-cand-0-79
  source 1..80: mol_type = other DNA
gttattcacaaggttcagcaatcttttgattttaacatagcaatttttagcttagatatacagagttttcttaatgtctg

SEQ ID NO: 21310 - DNA, 80 bp, synthetic construct
  misc_feature 1..80: note = Synthetic: >MN611525_3-cand-110-189
  source 1..80: mol_type = other DNA
tttgcggttctataaggctaataattctgcaatgacatatgtgttttccatatgttttacactttatggattaattgctg

SEQ ID NO: 21311 - DNA, 80 bp, synthetic construct
  misc_feature 1..80: note = Synthetic: >MN611525_4-cand-0-79
  source 1..80: mol_type = other DNA
gtgctggtgctcctgatggtttttgtaaacatggtgatacttttgtgtcaagggtcacagcagttaagggcactgttata

SEQ ID NO: 21312 - DNA, 80 bp, synthetic construct
  misc_feature 1..80: note = Synthetic: >MN611525_4-cand-150-229
  source 1..80: mol_type = other DNA
acacaggtagtgtcagtgacggccattacactgtctttgaatctaaggattgtagggtctatgatggtgacaaagtttcc

SEQ ID NO: 21313 - DNA, 80 bp, synthetic construct
  misc_feature 1..80: note = Synthetic: >MN611525_5-cand-0-79
  source 1..80: mol_type = other DNA
tgctttttacacacaagtaatattactgtgtctggcaccgctcattgagtattgctttccttacacagattattgccttg

SEQ ID NO: 21314 - DNA, 80 bp, synthetic construct
  misc_feature 1..80: note = Synthetic: >MN611525_5-cand-60-139
  source 1..80: mol_type = other DNA
ttacacagattattgccttgctaaagcatcttatagttccctttgctatagcttcctaggtttctccattcttattgcat

SEQ ID NO: 21315 - DNA, 80 bp, synthetic construct
  misc_feature 1..80: note = Synthetic: >MN611525_5-cand-200-279
  source 1..80: mol_type = other DNA
ctattagttataccaaatggctggcttaaaaatcttgtcacttcttgcaatggttgcagtggtttctgctgcaccagtga

SEQ ID NO: 21316 - DNA, 80 bp, synthetic construct
  misc_feature 1..80: note = Synthetic: >MN611525_6-cand-0-79
  source 1..80: mol_type = other DNA
cgtaacaatgtttgacctaactgttaacaccttcactattgctggtgtcaaagtcaaggcggttggtgactatgttttgc

SEQ ID NO: 21317 - DNA, 80 bp, synthetic construct
  misc_feature 1..80: note = Synthetic: >MN611525_6-cand-110-189
  source 1..80: mol_type = other DNA
caaaggttaagggtgtcaaacaggatggtttgaaaactatctcttttgcacatacaattgttggtgacactttaaaagtg

SEQ ID NO: 21318 - DNA, 80 bp, synthetic construct
  misc_feature 1..80: note = Synthetic: >MN611525_7-cand-0-79
  source 1..80: mol_type = other DNA
ctttgtttaatgttaacaacacttattacatcactgctcgagatatgtatgaacctcgtacaccacaatctagtgatttc

SEQ ID NO: 21319 - DNA, 80 bp, synthetic construct
  misc_feature 1..80: note = Synthetic: >MN611525_7-cand-50-129
  source 1..80: mol_type = other DNA
gaacctcgtacaccacaatctagtgatttcgtccgtattactggttgtattgttacttacctcaatcttagttctgatga

SEQ ID NO: 21320 - DNA, 80 bp, synthetic construct
  misc_feature 1..80: note = Synthetic: >MN611525_7-cand-170-249
  source 1..80: mol_type = other DNA
acacttgaggattttgcccaaaatatgcctaattactctgtgcctgacctagaccttggtgtttacaatcatactattct

SEQ ID NO: 21321 - DNA, 80 bp, synthetic construct
  misc_feature 1..80: note = Synthetic: >MN611525_7-cand-290-369
  source 1..80: mol_type = other DNA
gaccagctgcttgcttccactgtgcgtttgcaagaacttattgacaaccttaataagacctatgtggaccttgaatggtt

SEQ ID NO: 21322 - DNA, 80 bp, synthetic construct
  misc_feature 1..80: note = Synthetic: >MN611525_8-cand-0-79
  source 1..80: mol_type = other DNA
tacaggtttcacctagctaacaaatggtctagagttactgtgcagtgtcaaacaccacaatcttgtggcatcctacctgt

SEQ ID NO: 21323 - DNA, 80 bp, synthetic construct
  misc_feature 1..80: note = Synthetic: >MN611525_8-cand-100-179
  source 1..80: mol_type = other DNA
acatcactactgatgctaatggccgtattgccacctatagtgtttgtgattcatgcgctggttttcctgcacacgttttt

SEQ ID NO: 21324 - DNA, 80 bp, synthetic construct
  misc_feature 1..80: note = Synthetic: >MN611525_8-cand-320-399
  source 1..80: mol_type = other DNA
tttactcgcaacagacaaccctatttacttcaatttgtccagaagtgaaggtgttcgctgtaatggttttagaactgaag

SEQ ID NO: 21325 - DNA, 80 bp, synthetic construct
  misc_feature 1..80: note = Synthetic: >MN611525_8-cand-420-499
  source 1..80: mol_type = other DNA
ttttcccttaattttacgcaaacacaagtgcttaatggtgtgcacaatattgtttttaacaccgattacagcaattacac

SEQ ID NO: 21326 - DNA, 80 bp, synthetic construct
  misc_feature 1..80: note = Synthetic: >MN611525_9-cand-140-219
  source 1..80: mol_type = other DNA
tgacgaccctgcgtatcatggagacgtcactaatgttgattgtcccttcaatttccatacacttaacaattatttatcct

SEQ ID NO: 21327 - DNA, 80 bp, synthetic construct
  misc_feature 1..80: note = Synthetic: >MN611525_9-cand-250-329
  source 1..80: mol_type = other DNA
tagctagttcttgcagtatgagtatagatagtgtcattttagggtatcatcagcctttaggtgtgttgtacataagtcac

SEQ ID NO: 21328 - DNA, 80 bp, synthetic construct
  misc_feature 1..80: note = Synthetic: >MN611525_9-cand-360-439
  source 1..80: mol_type = other DNA
cgctctacaggtggtgtttatgactcaagtgttgtttacacaggtgtttgtactgactatacaatttatggtgtgacagg

SEQ ID NO: 21329 - DNA, 80 bp, synthetic construct
  misc_feature 1..80: note = Synthetic: >MN611525_9-cand-470-549
  source 1..80: mol_type = other DNA
tataattgctggtttgtattacacttctgtgtcaggtcaattacttggcttcaaaaatgctactaatggtgttgtgtatg

SEQ ID NO: 21330 - DNA, 80 bp, synthetic construct
  misc_feature 1..80: note = Synthetic: >NC_003045_3-cand-260-339
  source 1..80: mol_type = other DNA
ctccagagtttgaatctgaaatttaaaattgttcaatggcaggaggcgtggcttgaatttcgttctggccgccctgctag

SEQ ID NO: 21331 - DNA, 80 bp, synthetic construct
  misc_feature 1..80: note = Synthetic: >NC_045512_1-cand-0-79
  source 1..80: mol_type = other DNA
aaagagtcttcaaggtaatgtcaaataccataacatattttttaagtttttgtatacttcctaggaatatatgtcatagt

SEQ ID NO: 21332 - DNA, 80 bp, synthetic construct
  misc_feature 1..80: note = Synthetic: >NC_045512_1-cand-250-329
  source 1..80: mol_type = other DNA
ctaggcctctaacatagtaactttaacagtttgtacttatacatattttcacattgaaatatagttttattcatgacttt

SEQ ID NO: 21333 - DNA, 80 bp, synthetic construct
  misc_feature 1..80: note = Synthetic: >NC_045512_1-cand-360-439
  source 1..80: mol_type = other DNA
ttcaagctgctaaaaattaaaaatatcctatagcaaagggctatggcatctttttgtaaaaataaggaaagcaaggtttt

SEQ ID NO: 21334 - DNA, 80 bp, synthetic construct
  misc_feature 1..80: note = Synthetic: >PDF_0663_1-cand-20-99
  source 1..80: mol_type = other DNA
gaagcccagcttagaggtgaaaatccctcaatactgaaacaattacgtaaggctgctaacattgcaaagagtaactttga

SEQ ID NO: 21335 - DNA, 80 bp, synthetic construct
  misc_feature 1..80: note = Synthetic: >PDF_0663_2-cand-0-79
  source 1..80: mol_type = other DNA
gacaaggttgttgaaccattgaacgtgttgtttgacgctagggatcctggtgccattgacatgttcatgaacgctaaaaa

SEQ ID NO: 21336 - DNA, 80 bp, synthetic construct
  misc_feature 1..80: note = Synthetic: >PDF_0663_2-cand-120-199
  source 1..80: mol_type = other DNA
gggattaaagggcctaaccatgccgtcttgaacggtaacataattgaaactactgacaagcaagcgcctgcagtagacac

SEQ ID NO: 21337 - DNA, 80 bp, synthetic construct
  misc_feature 1..80: note = Synthetic: >PDF_0663_3-cand-0-79
  source 1..80: mol_type = other DNA
attacaaaagataatgctcataacctatcatggcctcttattgttactggtgtgcgcagagatgctgctataaagctaca

SEQ ID NO: 21338 - DNA, 80 bp, synthetic construct
  misc_feature 1..80: note = Synthetic: >PDF_0663_3-cand-90-169
  source 1..80: mol_type = other DNA
ttggcacctataggtcttaaacaaatgacttgcactgctggtgcatctcaaactagttgtagtgactcgtgtttagccta

SEQ ID NO: 21339 - DNA, 80 bp, synthetic construct
  misc_feature 1..80: note = Synthetic: >PDF_0663_3-cand-180-259
  source 1..80: mol_type = other DNA
gttaatggcaataagtttgttcttgctattttgtctgacaacgatggccagaaatgggctcgtgtcttaaaacaagatga

SEQ ID NO: 21340 - DNA, 80 bp, synthetic construct
  misc_feature 1..80: note = Synthetic: >PDF_0663_3-cand-270-349
  source 1..80: mol_type = other DNA
gttattgaactggaacccccatgccgtttcatcgctaacacacctagtggtcctaaaattaagtatttgtactttatcaa

SEQ ID NO: 21341 - DNA, 80 bp, synthetic construct
  misc_feature 1..80: note = Synthetic: >PDF_0663_3-cand-360-439
  source 1..80: mol_type = other DNA
aatttaaacagaggagtagtactggggtcagttgcctccactgtgcgtttacaagcaggtaacaacactgaggttgcaag

SEQ ID NO: 21342 - DNA, 80 bp, synthetic construct
  misc_feature 1..80: note = Synthetic: >PDF_0663_3-cand-560-639
  source 1..80: mol_type = other DNA
aggtagtggtgttgctatttcaggtaagcctgaagctaatgcagaccaagaaagttttggtggagcatcttgttgccttt

SEQ ID NO: 21343 - DNA, 80 bp, synthetic construct
  misc_feature 1..80: note = Synthetic: >PDF_0663_3-cand-650-729
  source 1..80: mol_type = other DNA
tcatattgaccatcctacgactaatggcatttgtaagctcaaagggaaatatgtgcaaataccactggtgtcttgctctg

SEQ ID NO: 21344 - DNA, 80 bp, synthetic construct
  misc_feature 1..80: note = Synthetic: >PDF_0663_3-cand-740-819
  source 1..80: mol_type = other DNA
ctttatacttaagaactccgtatgcaacgtatgtagcatgtggagaggatatggctgtccatgcgatgcaatcagagaac

SEQ ID NO: 21345 - DNA, 80 bp, synthetic construct
  misc_feature 1..80: note = Synthetic: >PDF_0663_4-cand-0-79
  source 1..80: mol_type = other DNA
cttgggcttttaaccctgaatgcaatatgctgctgacagtgccactgagaggacgcaccatcaccagacccatgaccgag

SEQ ID NO: 21346 - DNA, 80 bp, synthetic construct
  misc_feature 1..80: note = Synthetic: >PDF_0663_4-cand-90-169
  source 1..80: mol_type = other DNA
ttgtcaacggaattgtgctgagaggatacttgagaatggctggtaataacattggcagatgtgacctggattccttgccg

SEQ ID NO: 21347 - DNA, 80 bp, synthetic construct
  misc_feature 1..80: note = Synthetic: >PDF_0663_4-cand-310-389
  source 1..80: mol_type = other DNA
ggatgctgacaaagtagcgctgctcgtgccgtaagagaaagtgctgtaaataataatatttaatagtagtttgctgttat

SEQ ID NO: 21348 - DNA, 80 bp, synthetic construct
  misc_feature 1..80: note = Synthetic: >PDF_0663_4-cand-400-479
  source 1..80: mol_type = other DNA
tttgtatagcataaagtacaaactttatcacaatcatgtctcagcctcagccacaacgcgtgacttttgctgaccaaact

SEQ ID NO: 21349 - DNA, 80 bp, synthetic construct
  misc_feature 1..80: note = Synthetic: >PDF_0663_4-cand-490-569
  source 1..80: mol_type = other DNA
ataactcccaaggtgctcgccctaaaaacaagaagccacgtgctccacttaatgacaacattagctggttcactgctatc

SEQ ID NO: 21350 - DNA, 80 bp, synthetic construct
  misc_feature 1..80: note = Synthetic: >PDF_0663_4-cand-580-659
  source 1..80: mol_type = other DNA
gcaagaatcctttggtgttttccaatggtcaaggtgtgcctcgcaattccaatgctaacctagaccaagaaattggttac

SEQ ID NO: 21351 - DNA, 80 bp, synthetic construct
  misc_feature 1..80: note = Synthetic: >PDF_0663_4-cand-670-749
  source 1..80: mol_type = other DNA
caactcgcaaggctaacgtcaatggcaaacccaaggaaatggcaccccgctggtatttctactactacgggacaggccct

SEQ ID NO: 21352 - DNA, 80 bp, synthetic construct
  misc_feature 1..80: note = Synthetic: >PDF_0663_4-cand-760-839
  source 1..80: mol_type = other DNA
tgcagtttaactcacaccaggacggcattgtatgggtagctacaccaaatgcgctgatccaaccatcgccatttggtact

SEQ ID NO: 21353 - DNA, 80 bp, synthetic construct
  misc_feature 1..80: note = Synthetic: >PDF_0663_4-cand-850-929
  source 1..80: mol_type = other DNA
gcaatgacgatgcaattgtcacaacttttgctcctggtactcaactgccaaaaggctgctatattgaaggctctcgtggc

SEQ ID NO: 21354 - DNA, 80 bp, synthetic construct
  misc_feature 1..80: note = Synthetic: >PDF_0663_4-cand-940-1019
  source 1..80: mol_type = other DNA
ccagtgcagcttcttctagggcgagttctcgtagctcatccagaaattccacaccaggcggtagtagagcaaactccact

SEQ ID NO: 21355 - DNA, 80 bp, synthetic construct
  misc_feature 1..80: note = Synthetic: >PDF_0663_4-cand-1030-1109
  source 1..80: mol_type = other DNA
ctgcttctgctggtgctgacgccttaacattgctactcatccaaaagctcgagaagctggaggacaaagtgaatgggaca

SEQ ID NO: 21356 - DNA, 80 bp, synthetic construct
  misc_feature 1..80: note = Synthetic: >PDF_0663_5-cand-90-169
  source 1..80: mol_type = other DNA
cactttaaatgctttagcgtggttgtatgctgcagttataaatggagagcgttggtttgtgtctacacaatcactgtcta

SEQ ID NO: 21357 - DNA, 80 bp, synthetic construct
  misc_feature 1..80: note = Synthetic: >PDF_0663_5-cand-180-259
  source 1..80: mol_type = other DNA
taatgctgctatgatcaagtatggttatgaacagcttacagatgaagttgcatcactcttagaccctctgatagctcaga

SEQ ID NO: 21358 - DNA, 80 bp, synthetic construct
  misc_feature 1..80: note = Synthetic: >PDF_0663_5-cand-260-339
  source 1..80: mol_type = other DNA
caggtgtctctttgggtgttatgttagcttctgttagagatttgtgttctaatggttttaatggaaaaactattctggga

SEQ ID NO: 21359 - DNA, 80 bp, synthetic construct
  misc_feature 1..80: note = Synthetic: >PDF_0663_5-cand-340-419
  source 1..80: mol_type = other DNA
caaccaggtattgaggatgaacatacgccgtatgatgtcatccgtcaatgctcaggagtgacgttacagagtaagactaa

SEQ ID NO: 21360 - DNA, 80 bp, synthetic construct
  misc_feature 1..80: note = Synthetic: >PDF_0663_5-cand-430-509
  source 1..80: mol_type = other DNA
aagagcaccatccagtggctcttattgacagcagttatgtctgttcttgtcctgtcacaacttacatcttgggtgttatt

SEQ ID NO: 21361 - DNA, 80 bp, synthetic construct
  misc_feature 1..80: note = Synthetic: >PDF_0663_5-cand-520-599
  source 1..80: mol_type = other DNA
cttggtcatttattaataccttttattggatgcatcatcctattttcagcagctgctactgtactaattaaacacaagca

SEQ ID NO: 21362 - DNA, 80 bp, synthetic construct
  misc_feature 1..80: note = Synthetic: >PDF_0663_5-cand-610-689
  source 1..80: mol_type = other DNA
tgtgtttatgtactgccagctttagctactcttgcttattacaatgccatgtatgaacctagtggtttgtacgaaatggt

SEQ ID NO: 21363 - DNA, 80 bp, synthetic construct
  misc_feature 1..80: note = Synthetic: >PDF_0663_5-cand-700-779
  source 1..80: mol_type = other DNA
tacctcaatttaatgaacagtaatgcttttggcatccagtttaaggagtgcgctctttgcgtatttactgttattgttct

SEQ ID NO: 21364 - DNA, 80 bp, synthetic construct
  misc_feature 1..80: note = Synthetic: >PDF_0663_5-cand-790-869
  source 1..80: mol_type = other DNA
acacgacgcatggttaacactgacattactaccaaactgtgggtgttagtatccagcgctctgtggacttacacattctt

SEQ ID NO: 21365 - DNA, 80 bp, synthetic construct
  misc_feature 1..80: note = Synthetic: >PDF_0663_5-cand-880-959
  source 1..80: mol_type = other DNA
acgaccgaacaggccgttgcgttctggagtatgacattgtctattacacatggttacagtgtcgtagtaatggcttcatt

SEQ ID NO: 21366 - DNA, 80 bp, synthetic construct
  misc_feature 1..80: note = Synthetic: >PDF_0663_5-cand-970-1049
  source 1..80: mol_type = other DNA
cagatccttgtgtctttgatcaagtacacgtacaccttagatattgttatctacgatgacataaagctacttatggttgc

SEQ ID NO: 21367 - DNA, 80 bp, synthetic construct
  misc_feature 1..80: note = Synthetic: >PDF_0663_5-cand-1060-1139
  source 1..80: mol_type = other DNA
gttggttatgtctgtacttgttattttggtatctttggcctgcttaataaattgttccgcatgacactcggtgtctacga

SEQ ID NO: 21368 - DNA, 80 bp, synthetic construct
  misc_feature 1..80: note = Synthetic: >PDF_0663_5-cand-1150-1229
  source 1..80: mol_type = other DNA
agtgcccaagagtttagatacatgaattcacaaggtcttgtgcctccgcggaacacactagaggctttacgtttgaacct

SEQ ID NO: 21369 - DNA, 80 bp, synthetic construct
  misc_feature 1..80: note = Synthetic: >PDF_0663_6-cand-0-79
  source 1..80: mol_type = other DNA
ttttactaagcttgataaccttaggctagaaaatataaagtcagcaccaagtatacccgtcttgatgtacaatgcaaaga

SEQ ID NO: 21370 - DNA, 80 bp, synthetic construct
  misc_feature 1..80: note = Synthetic: >PDF_0663_6-cand-70-149
  source 1..80: mol_type = other DNA
aatgcaaagaataaggcggatgagactatgtgcaggcacgcgtgcgtttattactcacaggtgtgctgccaacccattat

SEQ ID NO: 21371 - DNA, 80 bp, synthetic construct
  misc_feature 1..80: note = Synthetic: >PDF_0663_6-cand-150-229
  source 1..80: mol_type = other DNA
cctggtcgacatgagcttgatgtcatctgtgacagatgctgttgaccttaatgtgaaactttttgacgcttatgtcaata

SEQ ID NO: 21372 - DNA, 80 bp, synthetic construct
  misc_feature 1..80: note = Synthetic: >PDF_0663_6-cand-240-319
  source 1..80: mol_type = other DNA
tacttttaaagctacacaagagaagcttaagaatcttatctccacagccaaagatgccataaagagtggcacagctgtgg

SEQ ID NO: 21373 - DNA, 80 bp, synthetic construct
  misc_feature 1..80: note = Synthetic: >PDF_0663_6-cand-330-409
  source 1..80: mol_type = other DNA
taagtcatttgtcgatgctgctagaacagatgtggtagactctgatgttgacaccaaggatgtctgtgcggctgttaaat

SEQ ID NO: 21374 - DNA, 80 bp, synthetic construct
  misc_feature 1..80: note = Synthetic: >PDF_0663_6-cand-420-499
  source 1..80: mol_type = other DNA
caatgacataccactaacaactgatagttggaataattatgtgcttacttatcataagcctgagcacatgtcaacacatg

SEQ ID NO: 21375 - DNA, 80 bp, synthetic construct
  misc_feature 1..80: note = Synthetic: >PDF_0663_6-cand-510-589
  source 1..80: mol_type = other DNA
ttgtatggatgccgaagcgcgccgagtacactccaatgttgttaagaacaaaaacgtttccttggtttggaatgttaaac

SEQ ID NO: 21376 - DNA, 80 bp, synthetic construct
  misc_feature 1..80: note = Synthetic: >PDF_0663_6-cand-600-679
  source 1..80: mol_type = other DNA
actctcccctgcatttcagaaacaagtgcgttctcatgcaaagagggaaggagttatgttaaaacttactagttctaaga

SEQ ID NO: 21377 - DNA, 80 bp, synthetic construct
  misc_feature 1..80: note = Synthetic: >PDF_0663_6-cand-680-759
  source 1..80: mol_type = other DNA
ctagacaagttgatgatattgtttctaccaagtttagtatatctggtggaagtcttaagaaaaatgtaatgaaggcagtt

SEQ ID NO: 21378 - DNA, 80 bp, synthetic construct
  misc_feature 1..80: note = Synthetic: >PDF_0663_6-cand-770-849
  source 1..80: mol_type = other DNA
catttggtttgtttgtacttgcatgtttacactggtttttgttgccagctcatgtaatgcctgttcatagtttgcacagt

SEQ ID NO: 21379 - DNA, 80 bp, synthetic construct
  misc_feature 1..80: note = Synthetic: >PDF_0663_6-cand-850-929
  source 1..80: mol_type = other DNA
gattatattgttgattttaaagtgattgacaataacatcattcgtgatatcaatgtacaagagacttgttttgctaacaa

SEQ ID NO: 21380 - DNA, 80 bp, synthetic construct
  misc_feature 1..80: note = Synthetic: >PDF_0663_6-cand-930-1009
  source 1..80: mol_type = other DNA
gcactttaagtttatagaatggttccagaataagggaggtgaaatccataagaattctgtgacctgccctattgttgttg

SEQ ID NO: 21381 - DNA, 80 bp, synthetic construct
  misc_feature 1..80: note = Synthetic: >PDF_0663_6-cand-1010-1089
  source 1..80: mol_type = other DNA
cggttgtagccaaacttgtaggtgacaacattcctaatgtacctggtgttgttgtaaaacattatggtgctattatgcat

SEQ ID NO: 21382 - DNA, 80 bp, synthetic construct
  misc_feature 1..80: note = Synthetic: >PDF_0663_6-cand-1100-1179
  source 1..80: mol_type = other DNA
gtgcatttggtgttgacagcactatgtgttatacacctaatgtacaagttagttacaataactttcagcagagtccatgc

SEQ ID NO: 21383 - DNA, 80 bp, synthetic construct
  misc_feature 1..80: note = Synthetic: >PDF_0663_6-cand-1180-1259
  source 1..80: mol_type = other DNA
gttttgtctagcgagtgtactctattcagagatgcttcaggtgctatgaagccatattgttttgacactaatgctcttac

SEQ ID NO: 21384 - DNA, 80 bp, synthetic construct
  misc_feature 1..80: note = Synthetic: >PDF_0663_6-cand-1260-1339
  source 1..80: mol_type = other DNA
aggttctgtggcttatagtgaactcaaaccacatgtccgttatgatctgtatgaagataacggttacattagattccctg

SEQ ID NO: 21385 - DNA, 80 bp, synthetic construct
  misc_feature 1..80: note = Synthetic: >PDF_0663_6-cand-1340-1419
  source 1..80: mol_type = other DNA
aagtgacacttgaaggtacacttaggatcgttaataccatggcaacggagtactgtagatacggctcatgtgaaacttca

SEQ ID NO: 21386 - DNA, 80 bp, synthetic construct
  misc_feature 1..80: note = Synthetic: >PDF_0663_6-cand-1420-1499
  source 1..80: mol_type = other DNA
cgtgcaggcgtttgtgtgtctacaaaaggctcttgggttgtctttaatgatcggtactctaatgaggctggtgtttattg

SEQ ID NO: 21387 - DNA, 80 bp, synthetic construct
  misc_feature 1..80: note = Synthetic: >PDF_0663_6-cand-1500-1579
  source 1..80: mol_type = other DNA
tggagaagacaagtatgacttgttctttaacatattcaaacctatgtttcaaccagtaggaacattagacgtgtccacat

SEQ ID NO: 21388 - DNA, 80 bp, synthetic construct
  misc_feature 1..80: note = Synthetic: >PDF_0663_6-cand-1580-1659
  source 1..80: mol_type = other DNA
ctgttattgcaggagctattcttgcattgactattatgtgtgccatgtatttcctactgaaatttaagagcatgtttaga

SEQ ID NO: 21389 - DNA, 80 bp, synthetic construct
  misc_feature 1..80: note = Synthetic: >PDF_0663_6-cand-1660-1739
  source 1..80: mol_type = other DNA
gactacactcaagtggcagctgttaatttgcttgcatttttcgtgtcatttagcgttgtctgccttgcacctacatatgt

SEQ ID NO: 21390 - DNA, 80 bp, synthetic construct
  misc_feature 1..80: note = Synthetic: >PDF_0663_6-cand-1740-1819
  source 1..80: mol_type = other DNA
ttggctgcctacagtgtactcagccatgtatatgtattgcacactctattttcctgctgaggtagcagttataatgcatg

SEQ ID NO: 21391 - DNA, 80 bp, synthetic construct
  misc_feature 1..80: note = Synthetic: >PDF_0663_6-cand-1820-1899
  source 1..80: mol_type = other DNA
catcatggtgtgttatgttcttttccttagtgcctatgtggttctatgtgttgtacattatggtctgtttttccaacaga

SEQ ID NO: 21392 - DNA, 80 bp, synthetic construct
  misc_feature 1..80: note = Synthetic: >PDF_0663_7-cand-0-79
  source 1..80: mol_type = other DNA
actgttaatgtcgttatgacaaacgacatacttgttaatgtttagaactttattatgcagctattcaagcaaattaagaa

SEQ ID NO: 21393 - DNA, 80 bp, synthetic construct
  misc_feature 1..80: note = Synthetic: >PDF_0663_7-cand-80-159
  source 1..80: mol_type = other DNA
tagttggtttgcacttagtgttgaacagagagtcacacttgtgcttgttagtcttagttgtacagccatgattatggcta

SEQ ID NO: 21394 - DNA, 80 bp, synthetic construct
  misc_feature 1..80: note = Synthetic: >PDF_0663_7-cand-150-229
  source 1..80: mol_type = other DNA
attatggctactatgactatgtcagaaggatatatggacaatagtcgctatcctaagcactctagacatgaagttgtcta

SEQ ID NO: 21395 - DNA, 80 bp, synthetic construct
  misc_feature 1..80: note = Synthetic: >PDF_0663_7-cand-230-309
  source 1..80: mol_type = other DNA
tgagattacaaattctactacgcgtaccactagtgtgcaattgtacacaagaattggtacgtgctgcaattattttgctg

SEQ ID NO: 21396 - DNA, 80 bp, synthetic construct
  misc_feature 1..80: note = Synthetic: >PDF_0663_7-cand-310-389
  source 1..80: mol_type = other DNA
tatggcctactcacactacttgtaggctgccacttgtgcataatcagtatgacaataccattaggtgtgttagaaaagta

SEQ ID NO: 21397 - DNA, 80 bp, synthetic construct
  misc_feature 1..80: note = Synthetic: >PDF_0663_7-cand-390-469
  source 1..80: mol_type = other DNA
ccaacaccaggtacattcttccacatgaatgtgtgtcctgatgtattaataactcgtaaaagtttgcgcaagtgtacaaa

SEQ ID NO: 21398 - DNA, 80 bp, synthetic construct
  misc_feature 1..80: note = Synthetic: >PDF_0663_7-cand-470-549
  source 1..80: mol_type = other DNA
ctttaatttaaatttagcttaaagctacaaaaacgggtccctacaagcagttgcgcctttgggcggctgagtggggattt

SEQ ID NO: 21399 - DNA, 80 bp, synthetic construct
  misc_feature 1..80: note = Synthetic: >PDF_0663_7-cand-550-629
  source 1..80: mol_type = other DNA
gaaaatccttttatagaagccagacacacatcctttggctggctagttagagtaaaatttgcctgtgaggcaactgaaca

SEQ ID NO: 21400 - DNA, 80 bp, synthetic construct
  misc_feature 1..80: note = Synthetic: >PDF_0663_7-cand-630-709
  source 1..80: mol_type = other DNA
ccattgtgcaacttacaaacaggctctacacaagtgctgtgaagagcttgttcgtattttgagttaaaatgccgaccaac

SEQ ID NO: 21401 - DNA, 80 bp, synthetic construct
  misc_feature 1..80: note = Synthetic: >PDF_0663_7-cand-710-789
  source 1..80: mol_type = other DNA
tatgtcaaaaagttgctgaagcatgctgctaaaaatgaaaatcccagtcccgtcatgaagatgcacttggacgaaatggg

SEQ ID NO: 21402 - DNA, 80 bp, synthetic construct
  misc_feature 1..80: note = Synthetic: >PDF_0663_7-cand-790-869
  source 1..80: mol_type = other DNA
ttggacttgttttatggaatacaaaaacgttgttgctatttcaaccacaagagacccagaacaatcctatcaaagggcag

SEQ ID NO: 21403 - DNA, 80 bp, synthetic construct
  misc_feature 1..80: note = Synthetic: >PDF_0663_7-cand-870-949
  source 1..80: mol_type = other DNA
ctctatccatctgtacaaaactgcttatatttttagtgttattgactgtaccggtgtgtgctaatgttggcaaccataat

SEQ ID NO: 21404 - DNA, 80 bp, synthetic construct
  misc_feature 1..80: note = Synthetic: >PDF_0663_7-cand-950-1029
  source 1..80: mol_type = other DNA
tgtacagctacacaggataatagtggtgacaacatacttcccactttagagtttgatcccaactacactgaaaatattac

SEQ ID NO: 21405 - DNA, 80 bp, synthetic construct
  misc_feature 1..80: note = Synthetic: >PDF_0663_7-cand-1030-1109
  source 1..80: mol_type = other DNA
acttactcaagacacgctctatggtaagggttttggtatctactattgggatgacgttttaagaattaatcaaacagttc

SEQ ID NO: 21406 - DNA, 80 bp, synthetic construct
  misc_feature 1..80: note = Synthetic: >PDF_0663_7-cand-1110-1189
  source 1..80: mol_type = other DNA
ttgttaatgacttatttgtgccacgtaacgcaccagcccatgtttgggcttcctatgtcactaacagaactgattcaagg

SEQ ID NO: 21407 - DNA, 80 bp, synthetic construct
  misc_feature 1..80: note = Synthetic: >PDF_0663_7-cand-1190-1269
  source 1..80: mol_type = other DNA
caagggctgatcataaaagtggcccctggcatttttgatacgtaccccttgaaggagggtgtagccattatggcacatcc

SEQ ID NO: 21408 - DNA, 80 bp, synthetic construct
  misc_feature 1..80: note = Synthetic: >PDF_0663_7-cand-1280-1359
  source 1..80: mol_type = other DNA
aataggcatcaccgtaattaccggccattggcttatatctttggttcttcttttaatgcctcctcttacacgttgctact

SEQ ID NO: 21409 - DNA, 80 bp, synthetic construct
  misc_feature 1..80: note = Synthetic: >PDF_0663_7-cand-1360-1439
  source 1..80: mol_type = other DNA
gtacagaaatgctacaggtgtggctaacgttaatagcaatggtaagtggcgcatatccgtttgtaggtatgaagtttgta

SEQ ID NO: 21410 - DNA, 80 bp, synthetic construct
  misc_feature 1..80: note = Synthetic: >PDF_0663_7-cand-1440-1519
  source 1..80: mol_type = other DNA
tgcaaccatattatatagtagggttttctaacttacatcagttaaaagaccatttgcttgttcataacgagacggactgt

SEQ ID NO: 21411 - DNA, 80 bp, synthetic construct
  misc_feature 1..80: note = Synthetic: >PDF_0663_7-cand-1520-1599
  source 1..80: mol_type = other DNA
atagttaaagaccatcctatagcagaggatgatgtttaccctgttatgaacacgctttacacccaacaacttattgtcaa

SEQ ID NO: 21412 - DNA, 80 bp, synthetic construct
  misc_feature 1..80: note = Synthetic: >PDF_0663_7-cand-1600-1679
  source 1..80: mol_type = other DNA
gaagaaccaagatggttctatgaccttttattggggttataatggctattattatggaggtgacggttatgacgtagcta

SEQ ID NO: 21413 - DNA, 80 bp, synthetic construct
  misc_feature 1..80: note = Synthetic: >PDF_0663_7-cand-1680-1759
  source 1..80: mol_type = other DNA
aacctttttatacttttagaggagatgctacattcacacattatgcagtcgcccccatgtttgtattgccaaaatcatcc

SEQ ID NO: 21414 - DNA, 80 bp, synthetic construct
  misc_feature 1..80: note = Synthetic: >PDF_0663_7-cand-1760-1839
  source 1..80: mol_type = other DNA
actaatgagaaggaaacatttcaaaatctcatggatgtgtacgctgcaaacctgcagcgcattaatatgctcttcaggtt

SEQ ID NO: 21415 - DNA, 80 bp, synthetic construct
  misc_feature 1..80: note = Synthetic: >PDF_0663_7-cand-1840-1919
  source 1..80: mol_type = other DNA
tgatcagcgcggacgcattgtgcagttttctgattgtgggtattcccccttcaatgaactgcagtgctcgcttctagatt

SEQ ID NO: 21416 - DNA, 80 bp, synthetic construct
  misc_feature 1..80: note = Synthetic: >PDF_0663_7-cand-1920-1999
  source 1..80: mol_type = other DNA
ttaatccggctgaaggtgtttataacacacataacttcagacagacacctaagaagaaggttgtcaggtatagtaatttc

SEQ ID NO: 21417 - DNA, 80 bp, synthetic construct
  misc_feature 1..80: note = Synthetic: >PDF_0663_7-cand-2000-2079
  source 1..80: mol_type = other DNA
acagtttgtgatttatctgacctctttgagtatgaaaacagcaataagcctccatcgccagttgattggaagcgtatttc

SEQ ID NO: 21418 - DNA, 80 bp, synthetic construct
  misc_feature 1..80: note = Synthetic: >PDF_0663_7-cand-2080-2159
  source 1..80: mol_type = other DNA
tttgaatgattgcattctgcctataagtacactatttcaacaagctatggtgtttgcgcagacgtgctacggtttgtcct

SEQ ID NO: 21419 - DNA, 80 bp, synthetic construct
  misc_feature 1..80: note = Synthetic: >PDF_0663_7-cand-2170-2249
  source 1..80: mol_type = other DNA
acaagacacttgtattaatggactggatgtggattattttaggataaacgaggccgatattgcatcactcacacctgacg

SEQ ID NO: 21420 - DNA, 80 bp, synthetic construct
  misc_feature 1..80: note = Synthetic: >PDF_0663_7-cand-2250-2329
  source 1..80: mol_type = other DNA
ctgtaggccctttaccagcttataactataggttatcaaagaaattcgatggttgcactatggctgtttctgctaactgc

SEQ ID NO: 21421 - DNA, 80 bp, synthetic construct
  misc_feature 1..80: note = Synthetic: >PDF_0663_7-cand-2330-2409
  source 1..80: mol_type = other DNA
tccgactgtgacaatgagctgaagtatgttattgctcaataccaaacaacaccaccgtgtgttgatgtatatggctattg

SEQ ID NO: 21422 - DNA, 80 bp, synthetic construct
  misc_feature 1..80: note = Synthetic: >PDF_0663_7-cand-2410-2489
  source 1..80: mol_type = other DNA
cataggacctggcgaacacaacccctatgctgcttcttacaggccgctttaccacataggctctgatcatatagctgaca

SEQ ID NO: 21423 - DNA, 80 bp, synthetic construct
  misc_feature 1..80: note = Synthetic: >PDF_0663_7-cand-2490-2569
  source 1..80: mol_type = other DNA
ctaccagaccgcgcaccagttggcaaagtgttcattataacaatgtcaccatgaaattaatggccgtagtcctttcttta

SEQ ID NO: 21424 - DNA, 80 bp, synthetic construct
  misc_feature 1..80: note = Synthetic: >PDF_0663_7-cand-2580-2659
  source 1..80: mol_type = other DNA
gtgctgtttgcggtgaacaagctactaaagtgtcaacaaatataaccactggcgagtgcgttgagtttgacattttaggt

SEQ ID NO: 21425 - DNA, 80 bp, synthetic construct
  misc_feature 1..80: note = Synthetic: >PDF_0663_7-cand-2660-2739
  source 1..80: mol_type = other DNA
aaaacaggtgttggcataattttgcccagcaacgagacgtacatgccttttcaaaatttcaagctttctaaagctggtaa

SEQ ID NO: 21426 - DNA, 80 bp, synthetic construct
  misc_feature 1..80: note = Synthetic: >PDF_0663_7-cand-2740-2819
  source 1..80: mol_type = other DNA
tttgattggattcaaagatcctttaacacaagatgcatatcatatcatgccttgtgaaacaggagccatttcaatcgtgc

SEQ ID NO: 21427 - DNA, 80 bp, synthetic construct
  misc_feature 1..80: note = Synthetic: >PDF_0663_7-cand-2820-2899
  source 1..80: mol_type = other DNA
atgggccacgagcaagcacagctgtgctctacactggtgtatcatgtaacgcttttaattataagtttgaacactacacc

SEQ ID NO: 21428 - DNA, 80 bp, synthetic construct
  misc_feature 1..80: note = Synthetic: >PDF_0663_7-cand-2900-2979
  source 1..80: mol_type = other DNA
gaatggaacaggctaactaaagatgtgcaaggtgaacagacatctataggctgtctttttggcggtgtcctatctaacct

SEQ ID NO: 21429 - DNA, 80 bp, synthetic construct
  misc_feature 1..80: note = Synthetic: >PDF_0663_7-cand-2980-3059
  source 1..80: mol_type = other DNA
aaccacacaggagtgtgatttgaaagtaggtgatggcctgtgtgctaaaccagttgacgctgctagctattataacaccc

SEQ ID NO: 21430 - DNA, 80 bp, synthetic construct
  misc_feature 1..80: note = Synthetic: >PDF_0663_7-cand-3060-3139
  source 1..80: mol_type = other DNA
acttgattagaggctccctgctagatggtggcctcaaccttacggaactctttgagtttcaaaacttcactctaggtgag

SEQ ID NO: 21431 - DNA, 80 bp, synthetic construct
  misc_feature 1..80: note = Synthetic: >PDF_0663_7-cand-3140-3219
  source 1..80: mol_type = other DNA
aaacattcaccattcacccccaaccttatggacatacctattaattttacaatgaacatgcaccaagagtatgtgcgtgt

SEQ ID NO: 21432 - DNA, 80 bp, synthetic construct
  misc_feature 1..80: note = Synthetic: >PDF_0663_7-cand-3220-3299
  source 1..80: mol_type = other DNA
gcatatggataaagtttccgtagactgtgcacaatatgtgtgcggctctgatccaacttgtaagcagttgttgattcagt

SEQ ID NO: 21433 - DNA, 80 bp, synthetic construct
  misc_feature 1..80: note = Synthetic: >PDF_0663_7-cand-3300-3379
  source 1..80: mol_type = other DNA
atggttcattctgtgatcaaataaatactgcattggccactgttgctcttgaacaagacaacaaccaaatgcgactgttt

SEQ ID NO: 21434 - DNA, 80 bp, synthetic construct
  misc_feature 1..80: note = Synthetic: >PDF_0663_7-cand-3380-3459
  source 1..80: mol_type = other DNA
gaaggcttagacaaaggtcgcctcaacacaccgccgttaaaccaaacattctttgatgattacaatgtatcatcgctgat

SEQ ID NO: 21435 - DNA, 80 bp, synthetic construct
  misc_feature 1..80: note = Synthetic: >PDF_0663_7-cand-3460-3539
  source 1..80: mol_type = other DNA
tggatgttatggcagcaactgtgaaggaagacagagccgctcctttatagaggatctactatataacaaagttgttatgg

SEQ ID NO: 21436 - DNA, 80 bp, synthetic construct
  misc_feature 1..80: note = Synthetic: >PDF_0663_7-cand-3540-3619
  source 1..80: mol_type = other DNA
cagaccctggttttatgcaaggttatgacaagtgtctgaagggtaactctttcaatgaccttgcttgtgcacaaaagttc

SEQ ID NO: 21437 - DNA, 80 bp, synthetic construct
  misc_feature 1..80: note = Synthetic: >PDF_0663_7-cand-3620-3699
  source 1..80: mol_type = other DNA
aatggcctcacagtgttaccaccagctatgaatgatgtgttgataggttcatacactgcctctttgctctcaggcactac

SEQ ID NO: 21438 - DNA, 80 bp, synthetic construct
  misc_feature 1..80: note = Synthetic: >PDF_0663_7-cand-3700-3779
  source 1..80: mol_type = other DNA
attggcagggttgggtatcataggttcagcagcaggtgcagcagcccaggttcctttctcgctacaaatggcgtataggt

SEQ ID NO: 21439 - DNA, 80 bp, synthetic construct
  misc_feature 1..80: note = Synthetic: >PDF_0663_7-cand-3780-3859
  source 1..80: mol_type = other DNA
tcaatggtatagctgtcacacaacaagtgctgtctgaaaatcaaaaacaaattgctaaccagttcaatcatgcgctggat

SEQ ID NO: 21440 - DNA, 80 bp, synthetic construct
  misc_feature 1..80: note = Synthetic: >PDF_0663_7-cand-3860-3939
  source 1..80: mol_type = other DNA
ctaattcaaaagggctttgacgccactaattctgcgcttggaaaaatccaggctgctgtcaatcaaaatgcccaagcatt

SEQ ID NO: 21441 - DNA, 80 bp, synthetic construct
  misc_feature 1..80: note = Synthetic: >PDF_0663_7-cand-3940-4019
  source 1..80: mol_type = other DNA
gcaaggtttgattggacagctttctaattcatttggggctatctccaatgctattaatgaaatcaaccagcgacttgaca

SEQ ID NO: 21442 - DNA, 80 bp, synthetic construct
  misc_feature 1..80: note = Synthetic: >PDF_0663_7-cand-4020-4099
  source 1..80: mol_type = other DNA
agatcgaggctgaacaacaaattgataggctgattaatggtagactccaagctttgcaagtctacgttactcagcaatta

SEQ ID NO: 21443 - DNA, 80 bp, synthetic construct
  misc_feature 1..80: note = Synthetic: >PDF_0663_7-cand-4110-4189
  source 1..80: mol_type = other DNA
cggaagttagagcctctgctttgctcgctaaacaaaaagttgacgaatgtgtcttaggacagtcgtcaagagataatttc

SEQ ID NO: 21444 - DNA, 80 bp, synthetic construct
  misc_feature 1..80: note = Synthetic: >PDF_0663_7-cand-4200-4279
  source 1..80: mol_type = other DNA
gtatgcatctcatgaccttcccccagtctgctccctatggtttgtacttcattcatatgacgtacaagccaactgaatat

SEQ ID NO: 21445 - DNA, 80 bp, synthetic construct
  misc_feature 1..80: note = Synthetic: >PDF_0663_7-cand-4280-4359
  source 1..80: mol_type = other DNA
aagaaatttcatgccgtttctgcactttgcataaacgacacgacaatcgtgcctcaaagtggcattttcgttaaagtcaa

SEQ ID NO: 21446 - DNA, 80 bp, synthetic construct
  misc_feature 1..80: note = Synthetic: >PDF_0663_7-cand-4360-4439
  source 1..80: mol_type = other DNA
caaaaccacttcttattacagtgatgaaagcaacgaggagtggcagattacagaacgtaactacttctaccccgtgccta

SEQ ID NO: 21447 - DNA, 80 bp, synthetic construct
  misc_feature 1..80: note = Synthetic: >PDF_0663_7-cand-4440-4519
  source 1..80: mol_type = other DNA
tcaccactgataatataaaatacacgcatgggtgttcctacacaacggaaaacaccacgcaagaaattttcaacccgaac

SEQ ID NO: 21448 - DNA, 80 bp, synthetic construct
  misc_feature 1..80: note = Synthetic: >PDF_0663_7-cand-4520-4599
  source 1..80: mol_type = other DNA
ttgccaaacttgcctaattttaaggatgagcttgacgagtggttcaaaaaccaaacaactcccaactttacgttgccaga

SEQ ID NO: 21449 - DNA, 80 bp, synthetic construct
  misc_feature 1..80: note = Synthetic: >PDF_0663_7-cand-4600-4679
  source 1..80: mol_type = other DNA
gttgcagaaattaaatgtcactatactagatttgcgcaatgaaatggcgcaactagagagcgtgataaaagagctcaata

SEQ ID NO: 21450 - DNA, 80 bp, synthetic construct
  misc_feature 1..80: note = Synthetic: >PDF_0663_7-cand-4680-4759
  source 1..80: mol_type = other DNA
actcctacattgacttgaaggagctgggcaagtacgagcaataccaaaagtggccctggtatatatggctgatcatatgg

SEQ ID NO: 21451 - DNA, 80 bp, synthetic construct
  misc_feature 1..80: note = Synthetic: >PDF_0663_7-cand-4760-4839
  source 1..80: mol_type = other DNA
gtagccttaatattgcttgtggtcattatatttttattgttcttcctaacctcgtgttgcaaatgcctgaaaggctgctg

SEQ ID NO: 21452 - DNA, 80 bp, synthetic construct
  misc_feature 1..80: note = Synthetic: >PDF_0663_7-cand-4840-4919
  source 1..80: mol_type = other DNA
cacatgtggtgcttgctgtgacaagtacgacgattacgagttggtagacaaacctcattatccttagaagtaatgttcaa

SEQ ID NO: 21453 - DNA, 80 bp, synthetic construct
  misc_feature 1..80: note = Synthetic: >PDF_0663_7-cand-4920-4999
  source 1..80: mol_type = other DNA
aacattgctatacctttttacctttggtactataaaacctgaacaacatcagccacaaacgctaaacgaagttcaggatc

SEQ ID NO: 21454 - DNA, 80 bp, synthetic construct
  misc_feature 1..80: note = Synthetic: >PDF_0663_7-cand-5000-5079
  source 1..80: mol_type = other DNA
gaatctctctcccagagagtaataactggaatttacaaaaacaaaatgctgagcacgcccaatttgttgctgatatgctt

SEQ ID NO: 21455 - DNA, 80 bp, synthetic construct
  misc_feature 1..80: note = Synthetic: >PDF_0663_7-cand-5080-5159
  source 1..80: mol_type = other DNA
attctgtgtgcaattttcgctcacattgctgtctggtggtttagtggcaattcttatgcttctaatatggccagactcat

SEQ ID NO: 21456 - DNA, 80 bp, synthetic construct
  misc_feature 1..80: note = Synthetic: >PDF_0663_7-cand-5160-5239
  source 1..80: mol_type = other DNA
tagctcagtatttactgtcaatttactttcaagtgctctgttacttgacagtgtcactcatgtgccacatactcttgcta

SEQ ID NO: 21457 - DNA, 80 bp, synthetic construct
  misc_feature 1..80: note = Synthetic: >PDF_0663_7-cand-5240-5319
  source 1..80: mol_type = other DNA
ttgtggttttgctcataactgggctctactactgttacagagtatgcttatgcatcaaagttaggtcgcatcttccattg

SEQ ID NO: 21458 - DNA, 80 bp, synthetic construct
  misc_feature 1..80: note = Synthetic: >PDF_0663_7-cand-5320-5399
  source 1..80: mol_type = other DNA
ctgtctgacgatgattactatatcacgtacgtggtaaatcacaaacaagtgaccataccatgtgcaaattataccaacat

SEQ ID NO: 21459 - DNA, 80 bp, synthetic construct
  misc_feature 1..80: note = Synthetic: >PDF_0663_7-cand-5400-5479
  source 1..80: mol_type = other DNA
catcactcttcatctccaagaaggagttgtgagtgcatgtggttacaaatataaaggtgacactgcaattgcagataacc

SEQ ID NO: 21460 - DNA, 80 bp, synthetic construct
  misc_feature 1..80: note = Synthetic: >PDF_0663_7-cand-5480-5559
  source 1..80: mol_type = other DNA
tttttctcataagcctcagatccaaacatctatttgttctcgaagagacggtggatgttggtctggctgtactagctgta

SEQ ID NO: 21461 - DNA, 80 bp, synthetic construct
  misc_feature 1..80: note = Synthetic: >PDF_0663_8-cand-0-79
  source 1..80: mol_type = other DNA
ctgtttcggtttgtgcgtgcgtatgcccacatattgaattctttttctagttctttttgagaacttgtgacaacgaactt

SEQ ID NO: 21462 - DNA, 80 bp, synthetic construct
  misc_feature 1..80: note = Synthetic: >PDF_0663_8-cand-90-169
  source 1..80: mol_type = other DNA
ctttctgtctgtggtgctgttatgcctgcagctttaagggaatttacccaaaaattagaatagtttagttgtaagatcct

SEQ ID NO: 21463 - DNA, 80 bp, synthetic construct
  misc_feature 1..80: note = Synthetic: >PDF_0663_8-cand-170-249
  source 1..80: mol_type = other DNA
gtgtctgtctcaccgtcccgcttgggtccgtgcacattagactgcctagttgtcttaaccagggggagcctctgggacgc

SEQ ID NO: 21464 - DNA, 80 bp, synthetic construct
  misc_feature 1..80: note = Synthetic: >PDF_0663_8-cand-250-329
  source 1..80: mol_type = other DNA
taggtactgtcgatcaagtgcagtgcgattccacttagggtgttgctagtaccgtctagtgacagctcgtcgagcacaat

SEQ ID NO: 21465 - DNA, 80 bp, synthetic construct
  misc_feature 1..80: note = Synthetic: >PDF_0663_8-cand-330-409
  source 1..80: mol_type = other DNA
gagcagcaaggcttgcaatctaaacatgaaatcccatgtgatggtaagcaccgaatggtctaccttacacaatgtaaatc

SEQ ID NO: 21466 - DNA, 80 bp, synthetic construct
  misc_feature 1..80: note = Synthetic: >PDF_0663_8-cand-410-489
  source 1..80: mol_type = other DNA
aagagcagatggaatgggctcctacaccagaggagtctcttgaactctgcagtgctgcagtcgcccgtcaggatggctca

SEQ ID NO: 21467 - DNA, 80 bp, synthetic construct
  misc_feature 1..80: note = Synthetic: >PDF_0663_8-cand-490-569
  source 1..80: mol_type = other DNA
gctgtttgggttggtcgagagaactggaatgtggttctttctagcaacaaaatcgttgtggtgctttcgaataagcgccg

SEQ ID NO: 21468 - DNA, 80 bp, synthetic construct
  misc_feature 1..80: note = Synthetic: >PDF_0663_8-cand-570-649
  source 1..80: mol_type = other DNA
tggcgatattaacatccaggaattgtccgcaattcatggagagaccatttatggtcgcttaggcgaagtcttagggattc

SEQ ID NO: 21469 - DNA, 80 bp, synthetic construct
  misc_feature 1..80: note = Synthetic: >PDF_0663_8-cand-660-739
  source 1..80: mol_type = other DNA
accatcctgcgctgatacctatggcagccttgaaattgtcgtacgtaagtatggcaaggcctctggtagctcaccaaagt

SEQ ID NO: 21470 - DNA, 80 bp, synthetic construct
  misc_feature 1..80: note = Synthetic: >PDF_0663_8-cand-750-829
  source 1..80: mol_type = other DNA
acgtgaatatgtgccctccgacgactgggagaaagctctcgactgttggcaggaaaaccccaaggacaaatatgccaagg

SEQ ID NO: 21471 - DNA, 80 bp, synthetic construct
  misc_feature 1..80: note = Synthetic: >PDF_0663_8-cand-830-909
  source 1..80: mol_type = other DNA
ggaattattccaaattcatgaaaggagctggtgagccgattctttgcgacagcggtttctgtggcattgatggcaaacct

SEQ ID NO: 21472 - DNA, 80 bp, synthetic construct
  misc_feature 1..80: note = Synthetic: >PDF_0663_8-cand-910-989
  source 1..80: mol_type = other DNA
ctcccttgtatggttgaatatatcaagaagaagggtcttatcctgactagtgtgcaggggttgcaggctcatcttgatag

SEQ ID NO: 21473 - DNA, 80 bp, synthetic construct
  misc_feature 1..80: note = Synthetic: >PDF_0663_8-cand-990-1069
  source 1..80: mol_type = other DNA
tcaaccaaaaccttttgagaccttttgtaaggatcacactcatcaggttgtcatagacgtagagcgagacgaacgcgttg

SEQ ID NO: 21474 - DNA, 80 bp, synthetic construct
  misc_feature 1..80: note = Synthetic: >PDF_0663_8-cand-1070-1149
  source 1..80: mol_type = other DNA
cctacgtggaacagactgtgttccatattagaagttttggccaacaatatcaacaggccaaactaccattcccatcatgg

SEQ ID NO: 21475 - DNA, 80 bp, synthetic construct
  misc_feature 1..80: note = Synthetic: >PDF_0663_8-cand-1150-1229
  source 1..80: mol_type = other DNA
acgtctgtggtgaaagcacgccttcgtcgcagtgtgactgggaagtctacattagccaatgctcaaaaactttttgacat

SEQ ID NO: 21476 - DNA, 80 bp, synthetic construct
  misc_feature 1..80: note = Synthetic: >PDF_0663_8-cand-1230-1309
  source 1..80: mol_type = other DNA
taactgtcttaaagagcttggtaatgcgcgacttaccacttttggcgtatgccctggatgtaaaatgtcagagtggaggt

SEQ ID NO: 21477 - DNA, 80 bp, synthetic construct
  misc_feature 1..80: note = Synthetic: >PDF_0663_8-cand-1310-1389
  source 1..80: mol_type = other DNA
tgtgtgacttcatgcacactcaatgtaagtgtggtctacaatttgagaacacagaagcagcatggcactctagtggccat

SEQ ID NO: 21478 - DNA, 80 bp, synthetic construct
  misc_feature 1..80: note = Synthetic: >PDF_0663_8-cand-1390-1469
  source 1..80: mol_type = other DNA
ctggataaacctgtgtgtgttcggatgaaatgctcagtttgcactgagaagccagaacactctaacaccatcttcttcaa

SEQ ID NO: 21479 - DNA, 80 bp, synthetic construct
  misc_feature 1..80: note = Synthetic: >PDF_0663_8-cand-1470-1549
  source 1..80: mol_type = other DNA
atcctgccagtatgcagattttgaggataagagttgcaagtttgtgcagtttggtggtgccatttggggctacataggat

SEQ ID NO: 21480 - DNA, 80 bp, synthetic construct
  misc_feature 1..80: note = Synthetic: >PDF_0663_8-cand-1550-1629
  source 1..80: mol_type = other DNA
gtgatgcaggtgaggctctttgggtccctcgtattcgttctgatgtaggagaaggacacactggagttgtaggcaacttc

SEQ ID NO: 21481 - DNA, 80 bp, synthetic construct
  misc_feature 1..80: note = Synthetic: >PDF_0663_8-cand-1630-1709
  source 1..80: mol_type = other DNA
cgtgttcatgatgatctcatgagaattaaacgagctggcgtcgatggagctaagactatcatcaattgtattggtgaggt

SEQ ID NO: 21482 - DNA, 80 bp, synthetic construct
  misc_feature 1..80: note = Synthetic: >PDF_0663_8-cand-1710-1789
  source 1..80: mol_type = other DNA
ttgcttcaacgaagctacagccgtactactagcatctgtgtctgacagcgttgagaacttcacatctaacgttgcaaact

SEQ ID NO: 21483 - DNA, 80 bp, synthetic construct
  misc_feature 1..80: note = Synthetic: >PDF_0663_8-cand-1790-1869
  source 1..80: mol_type = other DNA
tcagtgctgaaaattttaagcttctgctagaagctagtggtaagtacatagttacggcccagaatcacgttgctgatgcc

SEQ ID NO: 21484 - DNA, 80 bp, synthetic construct
  misc_feature 1..80: note = Synthetic: >PDF_0663_8-cand-1870-1949
  source 1..80: mol_type = other DNA
gttaacctggactttaccacaccttacataaataaagcattgacggccacagcgccattcattgctattcctaatcaagt

SEQ ID NO: 21485 - DNA, 80 bp, synthetic construct
  misc_feature 1..80: note = Synthetic: >PDF_0663_8-cand-1950-2029
  source 1..80: mol_type = other DNA
caaagatttgattagagttctttacaatacaccattcccacttacccggtgttgtatgagggatgttgttgaatcttcaa

SEQ ID NO: 21486 - DNA, 80 bp, synthetic construct
  misc_feature 1..80: note = Synthetic: >PDF_0663_8-cand-2030-2109
  source 1..80: mol_type = other DNA
ttaagacagtgtctaaagccttagagactttgcagtcggatctaactccgcaggcagtcttggcttttataaacactgtt

SEQ ID NO: 21487 - DNA, 80 bp, synthetic construct
  misc_feature 1..80: note = Synthetic: >PDF_0663_8-cand-2110-2189
  source 1..80: mol_type = other DNA
gattttgctgttgactcagccgtagctgtaggcttacagttgcataaaatgtttcaacaagtatcacagctggtacgacg

SEQ ID NO: 21488 - DNA, 80 bp, synthetic construct
  misc_feature 1..80: note = Synthetic: >PDF_0663_8-cand-2190-2269
  source 1..80: mol_type = other DNA
gatctttggcgagggatgtcaactcgttgaacgagtcatctcttggtttaagggtttgtctgcgtcagctgtagataagt

SEQ ID NO: 21489 - DNA, 80 bp, synthetic construct
  misc_feature 1..80: note = Synthetic: >PDF_0663_8-cand-2270-2349
  source 1..80: mol_type = other DNA
gcattgaagtttacaacttccttaaagagttcgcctcttgcacttttaaaatggtggatggtgtttttacaccagtaacc

SEQ ID NO: 21490 - DNA, 80 bp, synthetic construct
  misc_feature 1..80: note = Synthetic: >PDF_0663_8-cand-2350-2429
  source 1..80: mol_type = other DNA
caaaacgtctcagaacttcttacaggagtctgtgaccatattaccttcctacttcgcagcttgagaagctctgcaactct

SEQ ID NO: 21491 - DNA, 80 bp, synthetic construct
  misc_feature 1..80: note = Synthetic: >PDF_0663_8-cand-2430-2509
  source 1..80: mol_type = other DNA
agcaggagcgaaagtagtgacatttgagactgtaaacacattatatacagtcggagaacatttttacagtgttgccgaaa

SEQ ID NO: 21492 - DNA, 80 bp, synthetic construct
  misc_feature 1..80: note = Synthetic: >PDF_0663_8-cand-2510-2589
  source 1..80: mol_type = other DNA
aagcggttgaacaactgactatgcccatatttttcccttcaagcagtgtacgtaagaacgttaagttgctcgtgcctgtt

SEQ ID NO: 21493 - DNA, 80 bp, synthetic construct
  misc_feature 1..80: note = Synthetic: >PDF_0663_8-cand-2590-2669
  source 1..80: mol_type = other DNA
tttgacggtgttgatattgtacctgagctacaagcagaggatgtctccctggagaggaccactgagctcatggcgacaag

SEQ ID NO: 21494 - DNA, 80 bp, synthetic construct
  misc_feature 1..80: note = Synthetic: >PDF_0663_8-cand-2670-2749
  source 1..80: mol_type = other DNA
ccagactgcaactaatgtggttggcgtaccagtaatggtaggagacaccttgtgtgtcaagactgaaaatggttaccacg

SEQ ID NO: 21495 - DNA, 80 bp, synthetic construct
  misc_feature 1..80: note = Synthetic: >PDF_0663_8-cand-2750-2829
  source 1..80: mol_type = other DNA
tttgcacaacggagggcaaagtggcaccagctgtttttaagcttagaggtggcagtcctgtcaaccataaagttaccttc

SEQ ID NO: 21496 - DNA, 80 bp, synthetic construct
  misc_feature 1..80: note = Synthetic: >PDF_0663_8-cand-2830-2909
  source 1..80: mol_type = other DNA
ggaaacgaggaagtcaaggaaatacaagcattccgtgacatctctgtcacatttagtgtgaatcctaaaatagatggctt

SEQ ID NO: 21497 - DNA, 80 bp, synthetic construct
  misc_feature 1..80: note = Synthetic: >PDF_0663_8-cand-2910-2989
  source 1..80: mol_type = other DNA
gttaaatgccaaatgtgggactttcacagttgagaaagaagttggtttagaagaactaactaatgttgttgaagacgcca

SEQ ID NO: 21498 - DNA, 80 bp, synthetic construct
  misc_feature 1..80: note = Synthetic: >PDF_0663_8-cand-2990-3069
  source 1..80: mol_type = other DNA
tgttggaatttctaaggcctatcgttgatttgcttgaatccaacggtgtcgatattgacattgatgaccttgaatccact

SEQ ID NO: 21499 - DNA, 80 bp, synthetic construct
  misc_feature 1..80: note = Synthetic: >PDF_0663_8-cand-3070-3149
  source 1..80: mol_type = other DNA
aacttctatatgtttgatgaagcaggcgaagaagttgtggctaagcgtatgtatttctccactgaacctcccttcgaaga

SEQ ID NO: 21500 - DNA, 80 bp, synthetic construct
  misc_feature 1..80: note = Synthetic: >PDF_0663_8-cand-3150-3229
  source 1..80: mol_type = other DNA
tgaagaagagacagtagaagaagaaggacaacttgaggaccaagagccagaagacgcagactggttggaatacgaatctg

SEQ ID NO: 21501 - DNA, 80 bp, synthetic construct
  misc_feature 1..80: note = Synthetic: >PDF_0663_8-cand-3230-3309
  source 1..80: mol_type = other DNA
atagtgatgagactacaaaagaagttgattccaccactatctcgacagaagagcgaaacgtcgtcttactgtatgcagaa

SEQ ID NO: 21502 - DNA, 80 bp, synthetic construct
  misc_feature 1..80: note = Synthetic: >PDF_0663_8-cand-3310-3389
  source 1..80: mol_type = other DNA
gaagtagaagaaaacatcgtgaagaacaccgtgtcagaataccgggtttgtgtagcggtggcatcgagcggtacggaacc

SEQ ID NO: 21503 - DNA, 80 bp, synthetic construct
  misc_feature 1..80: note = Synthetic: >PDF_0663_8-cand-3390-3469
  source 1..80: mol_type = other DNA
ggctgtggaaagtgcggaagctgttgaaacgtgtcaccaaacacgtgtatacacagtggaagctacctctcccgtaacta

SEQ ID NO: 21504 - DNA, 80 bp, synthetic construct
  misc_feature 1..80: note = Synthetic: >PDF_0663_8-cand-3470-3549
  source 1..80: mol_type = other DNA
gtgaagactgtgcaccaccacagaaactagctagccaaggtgaagtcgaaacaggatgtgttccaactcccagtgatgtt

SEQ ID NO: 21505 - DNA, 80 bp, synthetic construct
  misc_feature 1..80: note = Synthetic: >PDF_0663_8-cand-3550-3629
  source 1..80: mol_type = other DNA
gaaactactttggatgctgcagcgagttctgatgatgaccttttctgcccacaaggtttttaccagtttagtgaaaatgt

SEQ ID NO: 21506 - DNA, 80 bp, synthetic construct
  misc_feature 1..80: note = Synthetic: >PDF_0663_8-cand-3630-3709
  source 1..80: mol_type = other DNA
tttcattaagtgtggtgattacatccaagaattaattaaaactagaccacctgtagctgttaacacagccaatgcatggc

SEQ ID NO: 21507 - DNA, 80 bp, synthetic construct
  misc_feature 1..80: note = Synthetic: >PDF_0663_8-cand-3710-3789
  source 1..80: mol_type = other DNA
taaaacatggaggtggtgtagcaggtctacttaatagacatactaaaggtgaaatgcaaaaagagtctgatgcttatgtg

SEQ ID NO: 21508 - DNA, 80 bp, synthetic construct
  misc_feature 1..80: note = Synthetic: >PDF_0663_8-cand-3790-3869
  source 1..80: mol_type = other DNA
gcagctaatggaactgttaaagtaggttctgcggctgtactaagtggatatgacttagctggttgcattttgcatgtagt

SEQ ID NO: 21509 - DNA, 80 bp, synthetic construct
  misc_feature 1..80: note = Synthetic: >PDF_0663_8-cand-3870-3949
  source 1..80: mol_type = other DNA
aggtccaaatgcacacaagggagaatctgaagaactccttgtggacgcatacaagaactacaacgagtatgatgttgttt

SEQ ID NO: 21510 - DNA, 80 bp, synthetic construct
  misc_feature 1..80: note = Synthetic: >PDF_0663_8-cand-3950-4029
  source 1..80: mol_type = other DNA
tcacaccacttgtgtctgcaggtatatttggaattacaccgcagaaaagctttgctaccttagttagcacatgtaaaaac

SEQ ID NO: 21511 - DNA, 80 bp, synthetic construct
  misc_feature 1..80: note = Synthetic: >PDF_0663_8-cand-4030-4109
  source 1..80: mol_type = other DNA
aaggtttatgtgctgactaatgatcaagcagtgtacgatagtcttgttaagcctaccagtacacatgatcaacctaaatc

SEQ ID NO: 21512 - DNA, 80 bp, synthetic construct
  misc_feature 1..80: note = Synthetic: >PDF_0663_8-cand-4110-4189
  source 1..80: mol_type = other DNA
aaaggttaagaaagtcaagaaattgacacctaaagggtctgtcacttatcttgaacaaaatttggaagatgccaaggcat

SEQ ID NO: 21513 - DNA, 80 bp, synthetic construct
  misc_feature 1..80: note = Synthetic: >PDF_0663_8-cand-4190-4269
  source 1..80: mol_type = other DNA
ttttagggggtaacatcattgtgttctgtaacacacagggacaattacaccccaattctaaacaccttgttaaggatgat

SEQ ID NO: 21514 - DNA, 80 bp, synthetic construct
  misc_feature 1..80: note = Synthetic: >PDF_0663_8-cand-4270-4349
  source 1..80: mol_type = other DNA
tttacacttccctcggttactaaccctggtgaggttcacttatttgatggtggtgctataattgtatcacctgataaacg

SEQ ID NO: 21515 - DNA, 80 bp, synthetic construct
  misc_feature 1..80: note = Synthetic: >PDF_0663_8-cand-4350-4429
  source 1..80: mol_type = other DNA
tcttgaacaaagccttgtcagctatacaaaagctttcaaggacttacctcaaggcacttatctaacaacgttgccggatg

SEQ ID NO: 21516 - DNA, 80 bp, synthetic construct
  misc_feature 1..80: note = Synthetic: >PDF_0663_8-cand-4430-4509
  source 1..80: mol_type = other DNA
gtgtgttcggttattcgaaagaagagctggatgctgtgttcgccgcaacaacatcaaaaataaacatctgccaagtggag

SEQ ID NO: 21517 - DNA, 80 bp, synthetic construct
  misc_feature 1..80: note = Synthetic: >PDF_0663_8-cand-4510-4589
  source 1..80: mol_type = other DNA
gaagtcactgattctaaggaaaaggtgatagacactatagttgcagatttcaagacagcggcagcactggccagaaaaag

SEQ ID NO: 21518 - DNA, 80 bp, synthetic construct
  misc_feature 1..80: note = Synthetic: >PDF_0663_8-cand-4590-4669
  source 1..80: mol_type = other DNA
caacaggactatggtcttttgcactggtaacgctgcactatgtcgtcaattccgcaaagcattcaaaacagagccacaag

SEQ ID NO: 21519 - DNA, 80 bp, synthetic construct
  misc_feature 1..80: note = Synthetic: >PDF_0663_8-cand-4670-4749
  source 1..80: mol_type = other DNA
accaaggtcttttctgtgttgatggtgtggactttatgacatatacatcaaaaacttctcttgataaagttgtcgaaagt

SEQ ID NO: 21520 - DNA, 80 bp, synthetic construct
  misc_feature 1..80: note = Synthetic: >PDF_0663_8-cand-4750-4829
  source 1..80: mol_type = other DNA
gtcaacaaattaaagagaggttgtgttgtcattccattgggattcatttcacatggattggctttagcacaatccgctgt

SEQ ID NO: 21521 - DNA, 80 bp, synthetic construct
  misc_feature 1..80: note = Synthetic: >PDF_0663_8-cand-4830-4909
  source 1..80: mol_type = other DNA
agttatgcgcggactgaaaattaattacactactgtgttgtcttcaacacagagtgaagcagattttaagaagtatctcg

SEQ ID NO: 21522 - DNA, 80 bp, synthetic construct
  misc_feature 1..80: note = Synthetic: >PDF_0663_8-cand-4910-4989
  source 1..80: mol_type = other DNA
tttcagacgaaatgcatccaacacaacagtttatagctgattgtaatactaagggtggtttctgtgattggacacctatt

SEQ ID NO: 21523 - DNA, 80 bp, synthetic construct
  misc_feature 1..80: note = Synthetic: >PDF_0663_8-cand-4990-5069
  source 1..80: mol_type = other DNA
agcgaacgcttacaaattagcgggcgtcagtaccaagcgtttcttcagagaagtgaagaaaaggtattggagtctgataa

SEQ ID NO: 21524 - DNA, 80 bp, synthetic construct
  misc_feature 1..80: note = Synthetic: >PDF_0663_8-cand-5070-5149
  source 1..80: mol_type = other DNA
tcaactatttgttcaaacaccacgagagcttaaagcctttaagtctttgaacaaattgcaggcttactgtagtgtaccta

SEQ ID NO: 21525 - DNA, 80 bp, synthetic construct
  misc_feature 1..80: note = Synthetic: >PDF_0663_8-cand-5150-5229
  source 1..80: mol_type = other DNA
tagcaaagctacaaacattgaaagtgttcactactgtggatggtgtgaatactcgctctaccattgttgacaagagcatg

SEQ ID NO: 21526 - DNA, 80 bp, synthetic construct
  misc_feature 1..80: note = Synthetic: >PDF_0663_8-cand-5230-5309
  source 1..80: mol_type = other DNA
ccttttggtcaacaaataggtaagtgttatttaggtggagatgatgtgacatcggtttatcccgaggatcatcacatcga

SEQ ID NO: 21527 - DNA, 80 bp, synthetic construct
  misc_feature 1..80: note = Synthetic: >PDF_0663_8-cand-5310-5389
  source 1..80: mol_type = other DNA
caaagtgttctttaccgtgtccgtggatgaaatcactgttagtgacgttcaagcacattatggtgtgagtgatgtgaatt

SEQ ID NO: 21528 - DNA, 80 bp, synthetic construct
  misc_feature 1..80: note = Synthetic: >PDF_0663_8-cand-5390-5469
  source 1..80: mol_type = other DNA
tcgttcagaaatacatgtctgcttttgatgccacacgtaaatggatttacaacgtggtagaaggattagtgactgttaaa

SEQ ID NO: 21529 - DNA, 80 bp, synthetic construct
  misc_feature 1..80: note = Synthetic: >PDF_0663_8-cand-5470-5549
  source 1..80: mol_type = other DNA
tggtcacagaataattgttacttaaacgttgctagcttgacattgcagcaacttaaagtaaaattcataacacctgccgt

SEQ ID NO: 21530 - DNA, 80 bp, synthetic construct
  misc_feature 1..80: note = Synthetic: >PDF_0663_8-cand-5550-5629
  source 1..80: mol_type = other DNA
taagaatgctttttataagttgcgtgcaggtgatcctagtgagttcttcgcgctaatggtggcttatggaggtactcaaa

SEQ ID NO: 21531 - DNA, 80 bp, synthetic construct
  misc_feature 1..80: note = Synthetic: >PDF_0663_8-cand-5630-5709
  source 1..80: mol_type = other DNA
taggagacactggtgaagcgtctcacattattagaagtatgcttaaacatgctgatattactgcaacccgcaaacaagtc

SEQ ID NO: 21532 - DNA, 80 bp, synthetic construct
  misc_feature 1..80: note = Synthetic: >PDF_0663_8-cand-5710-5789
  source 1..80: mol_type = other DNA
acaaattgtgaaaaatgcggtgctaaaactgacactataacaggcatagatgctatgtttgtttatggtgtcaacaccta

SEQ ID NO: 21533 - DNA, 80 bp, synthetic construct
  misc_feature 1..80: note = Synthetic: >PDF_0663_8-cand-5790-5869
  source 1..80: mol_type = other DNA
tgaagaatttatggaaagtcagaacacgtgttgtgcgtgtggagaggatgtgcctgttatacctatagaggttgacacac

SEQ ID NO: 21534 - DNA, 80 bp, synthetic construct
  misc_feature 1..80: note = Synthetic: >PDF_0663_8-cand-5870-5949
  source 1..80: mol_type = other DNA
ccttcttaatatgttgcaaccttcctaagcctgtgactgttgaagtatcaaaagcacagaaagaaggtttagtttgtgtc

SEQ ID NO: 21535 - DNA, 80 bp, synthetic construct
  misc_feature 1..80: note = Synthetic: >PDF_0663_8-cand-5950-6029
  source 1..80: mol_type = other DNA
aatgtgtttactggcaacctgacaggaggccactacacacacttgacgtgtaagaatctgctctataaaattgatggtgc

SEQ ID NO: 21536 - DNA, 80 bp, synthetic construct
  misc_feature 1..80: note = Synthetic: >PDF_0663_8-cand-6030-6109
  source 1..80: mol_type = other DNA
taattcctctaagacttcagaggttaccatcccttttgctgatgcagtttacaaaacacaaaagtacagttcccaagacg

SEQ ID NO: 21537 - DNA, 80 bp, synthetic construct
  misc_feature 1..80: note = Synthetic: >PDF_0663_8-cand-6110-6189
  source 1..80: mol_type = other DNA
taccttcagttgtgaggattgatggagtcaaaaggacagtttttaggaaggatttgtcagcatactacaaagttggcaac

SEQ ID NO: 21538 - DNA, 80 bp, synthetic construct
  misc_feature 1..80: note = Synthetic: >PDF_0663_8-cand-6190-6269
  source 1..80: mol_type = other DNA
gactacttcacaagttcacctttagacattacaccgacaggagtagtggctgacgtggaatacgataatttcagaattga

SEQ ID NO: 21539 - DNA, 80 bp, synthetic construct
  misc_feature 1..80: note = Synthetic: >PDF_0663_8-cand-6270-6349
  source 1..80: mol_type = other DNA
acctgtgtctcaggaactaacgcagttctgtaaagacttccataattttgtcaaccacgaccctactaaacctagtagag

SEQ ID NO: 21540 - DNA, 80 bp, synthetic construct
  misc_feature 1..80: note = Synthetic: >PDF_0663_8-cand-6350-6429
  source 1..80: mol_type = other DNA
ttgttacagtgtctcttcaaccggacttttctggtgaagtcattgtactagattacaaccgccattacactgatgtctta

SEQ ID NO: 21541 - DNA, 80 bp, synthetic construct
  misc_feature 1..80: note = Synthetic: >PDF_0663_8-cand-6430-6509
  source 1..80: mol_type = other DNA
cgtaggggtgcgttactccaaggtaaacatgtgttatggcatgttgctaagagggctcaacttaaatgtttggccaaagc

SEQ ID NO: 21542 - DNA, 80 bp, synthetic construct
  misc_feature 1..80: note = Synthetic: >PDF_0663_8-cand-6510-6589
  source 1..80: mol_type = other DNA
aaataagaatgcagcacgtaatatttcaaatgctaagactgtggagacagccaacaagtacagtgttttacctgttgagc

SEQ ID NO: 21543 - DNA, 80 bp, synthetic construct
  misc_feature 1..80: note = Synthetic: >PDF_0663_8-cand-6590-6669
  source 1..80: mol_type = other DNA
ccacagttgaagttgctgaagtagctgcacagcaagcacccatcactgaaacagttgttgaagtgagaggcataaagaaa

SEQ ID NO: 21544 - DNA, 80 bp, synthetic construct
  misc_feature 1..80: note = Synthetic: >PDF_0663_8-cand-6670-6749
  source 1..80: mol_type = other DNA
gaagaactcattagtactaacgatggtgttaccgtcctcaaacctactaatgatgtaaatgcaccaaaactcgttgatca

SEQ ID NO: 21545 - DNA, 80 bp, synthetic construct
  misc_feature 1..80: note = Synthetic: >PDF_0663_8-cand-6750-6829
  source 1..80: mol_type = other DNA
gttggatctgcctacagtccaggcagcagctattgacggtgagactaaattgcttgtgcgtaaaaacaacgcagttactg

SEQ ID NO: 21546 - DNA, 80 bp, synthetic construct
  misc_feature 1..80: note = Synthetic: >PDF_0663_8-cand-6830-6909
  source 1..80: mol_type = other DNA
aagatctaggcatagccacacttgcgaaaaggaaagtttgtgtggtgggcaatgttatcctacaaaagctttactcacat

SEQ ID NO: 21547 - DNA, 80 bp, synthetic construct
  misc_feature 1..80: note = Synthetic: >PDF_0663_8-cand-6910-6989
  source 1..80: mol_type = other DNA
gtgagtaaggaaacggtaggacaagtggccatggcatcgagagcggttggtacgtttctaatgaagctgccttgccgaag

SEQ ID NO: 21548 - DNA, 80 bp, synthetic construct
  misc_feature 1..80: note = Synthetic: >PDF_0663_8-cand-6990-7069
  source 1..80: mol_type = other DNA
agccttaggaattgttaaggatgcttatgtgaagttttcgccaagcatagtacttttgtttaccactttagttgctaatc

SEQ ID NO: 21549 - DNA, 80 bp, synthetic construct
  misc_feature 1..80: note = Synthetic: >PDF_0663_8-cand-7070-7149
  source 1..80: mol_type = other DNA
tatgtggtgttactcataaacgtgccaaggttatcgctcgcgtgcctggtactttgaccaagaacacgtttaagtcggtg

SEQ ID NO: 21550 - DNA, 80 bp, synthetic construct
  misc_feature 1..80: note = Synthetic: >PDF_0663_8-cand-7150-7229
  source 1..80: mol_type = other DNA
agtaagtgcgtctggaaacagttgactgcttacttcaagtctgaaaaatttttcgtactataccgtacgttaatgtgggt

SEQ ID NO: 21551 - DNA, 80 bp, synthetic construct
  misc_feature 1..80: note = Synthetic: >PDF_0663_8-cand-7230-7309
  source 1..80: mol_type = other DNA
gctcttggtaggaaccatgctagcctcatgcggttttatatacttgacatatgatttacgcctcagtgtacaggtgtcac

SEQ ID NO: 21552 - DNA, 80 bp, synthetic construct
  misc_feature 1..80: note = Synthetic: >PDF_0663_8-cand-7310-7389
  source 1..80: mol_type = other DNA
cgaaatggattcatagtgtcaaggaacaattaggttttagtactgtgtgtgacgcgtacataaatgactatattaatagc

SEQ ID NO: 21553 - DNA, 80 bp, synthetic construct
  misc_feature 1..80: note = Synthetic: >PDF_0663_8-cand-7390-7469
  source 1..80: mol_type = other DNA
agtgtttacagtgttaaaaattactgtgacaatgtagtgtgtggaatctgcttgactagttttgattcactgcacttgta

SEQ ID NO: 21554 - DNA, 80 bp, synthetic construct
  misc_feature 1..80: note = Synthetic: >PDF_0663_8-cand-7470-7549
  source 1..80: mol_type = other DNA
tgaagccttgagtatgacacaaacgcatttgtatgatgctctagacatgtcttttgtatatacagcattcgaatggctgt

SEQ ID NO: 21555 - DNA, 80 bp, synthetic construct
  misc_feature 1..80: note = Synthetic: >PDF_0663_8-cand-7550-7629
  source 1..80: mol_type = other DNA
tggcatacatgttacatacgaaagcatttaatggtctgtttttgttggcagttacccagtacatgcttaataattttaag

SEQ ID NO: 21556 - DNA, 80 bp, synthetic construct
  misc_feature 1..80: note = Synthetic: >PDF_0663_8-cand-7630-7709
  source 1..80: mol_type = other DNA
ttccaatctaacagttggttgctatcattgttaatctcttgtgttaggtttttacctctttcatcaatggttcgtatgta

SEQ ID NO: 21557 - DNA, 80 bp, synthetic construct
  misc_feature 1..80: note = Synthetic: >PDF_1704_1-cand-40-119
  source 1..80: mol_type = other DNA
tatgataggtgttcaagacaatgtgtggatattgcaggcttgtcctttttccatttttggagatgaaattgttgtagtct

SEQ ID NO: 21558 - DNA, 80 bp, synthetic construct
  misc_feature 1..80: note = Synthetic: >PDF_1704_10-cand-0-79
  source 1..80: mol_type = other DNA
tttggacctaggtttgcctggtaattccaatgcatttgtcagtggttacttacctcaacctaataactggatttgcaaga

SEQ ID NO: 21559 - DNA, 80 bp, synthetic construct
  misc_feature 1..80: note = Synthetic: >PDF_1704_10-cand-90-169
  source 1..80: mol_type = other DNA
acattatgaaaacatccatggcttcttttggtcatattatgcccaagcgcagcctgttgaaataggtgtttctaatgctg

SEQ ID NO: 21560 - DNA, 80 bp, synthetic construct
  misc_feature 1..80: note = Synthetic: >PDF_1704_10-cand-180-259
  source 1..80: mol_type = other DNA
taacccaaaccaatgggcactgtatgtttaccatgctaaccagtatggttatatgcatttcaagatctgtaaatggtcag

SEQ ID NO: 21561 - DNA, 80 bp, synthetic construct
  misc_feature 1..80: note = Synthetic: >PDF_1704_10-cand-260-339
  source 1..80: mol_type = other DNA
gtaagcacggttttaacaatcttccccagactaacaatggcttgtgtcttgttaaccgtaaattctcttttggttttgga

SEQ ID NO: 21562 - DNA, 80 bp, synthetic construct
  misc_feature 1..80: note = Synthetic: >PDF_1704_10-cand-350-429
  source 1..80: mol_type = other DNA
ctcaggttgtaggtgttacttggagtgataactttgtaaccctttactctcttaagaatgtttataggtttcatcttgtt

SEQ ID NO: 21563 - DNA, 80 bp, synthetic construct
  misc_feature 1..80: note = Synthetic: >PDF_1704_10-cand-440-519
  source 1..80: mol_type = other DNA
cgcgccttagtgttcgctgtgttaattctgcatcttgtgcaattaacccagtttataacatcagcacatttaatgtttcc

SEQ ID NO: 21564 - DNA, 80 bp, synthetic construct
  misc_feature 1..80: note = Synthetic: >PDF_1704_10-cand-530-609
  source 1..80: mol_type = other DNA
acggattaattctgtcatacagtgtttgcactgaatgtgatggttttccacagcatgttttccccgttcttgatggtgga

SEQ ID NO: 21565 - DNA, 80 bp, synthetic construct
  misc_feature 1..80: note = Synthetic: >PDF_1704_10-cand-620-699
  source 1..80: mol_type = other DNA
gtgattttgacttttcaaattggtttgttcttacaaatacttctaccatattgcagggacgcatacttgctgttcaacca

SEQ ID NO: 21566 - DNA, 80 bp, synthetic construct
  misc_feature 1..80: note = Synthetic: >PDF_1704_10-cand-710-789
  source 1..80: mol_type = other DNA
tgtgtctttggccagttccatcgttaacgtctaatgacaaacctatttattttaacctttctcaaacagaggatgcacgt

SEQ ID NO: 21567 - DNA, 80 bp, synthetic construct
  misc_feature 1..80: note = Synthetic: >PDF_1704_10-cand-800-879
  source 1..80: mol_type = other DNA
acaaaaccaatggaatggctgacttcttgagattttctctcaatttcacccagaaccaggttttaaatggtgttcataac

SEQ ID NO: 21568 - DNA, 80 bp, synthetic construct
  misc_feature 1..80: note = Synthetic: >PDF_1704_11-cand-0-79
  source 1..80: mol_type = other DNA
atgatggttctcagtcaaattcaagggctcagagtaacagcagagaccagagtggaaaccgttctcaatctcgctctcgt

SEQ ID NO: 21569 - DNA, 80 bp, synthetic construct
  misc_feature 1..80: note = Synthetic: >PDF_1704_11-cand-80-159
  source 1..80: mol_type = other DNA
aatcagagcaggaacaattcccaacaaaattctcagtctcagagcagaaatcgctctagaagcagctcatctgcaccaga

SEQ ID NO: 21570 - DNA, 80 bp, synthetic construct
  misc_feature 1..80: note = Synthetic: >PDF_1704_11-cand-170-249
  source 1..80: mol_type = other DNA
gttgacattgtggaagctgtaaaacttgcccttcaacaattgggcgtttctcctgctgaacagcagagtaaaaagtcaaa

SEQ ID NO: 21571 - DNA, 80 bp, synthetic construct
  misc_feature 1..80: note = Synthetic: >PDF_1704_11-cand-260-339
  source 1..80: mol_type = other DNA
tccaagtctggatcaaacacgccaaaaccagctcaacccaagacctcaccttcagtgcagcgtcgtcaggttgaccgccc

SEQ ID NO: 21572 - DNA, 80 bp, synthetic construct
  misc_feature 1..80: note = Synthetic: >PDF_1704_11-cand-350-429
  source 1..80: mol_type = other DNA
agaactcctagtgaggatgaaaatgtcactgtgtgcttcggaccacgtgattcactgcgcaactttggtgataaggatct

SEQ ID NO: 21573 - DNA, 80 bp, synthetic construct
  misc_feature 1..80: note = Synthetic: >PDF_1704_11-cand-440-519
  source 1..80: mol_type = other DNA
ggtgtaagtgctccacactacccacaaattgctgaactagctccatcaactgcagctattctttttggcagtgaagtctc

SEQ ID NO: 21574 - DNA, 80 bp, synthetic construct
  misc_feature 1..80: note = Synthetic: >PDF_1704_11-cand-630-709
  source 1..80: mol_type = other DNA
aatcccctgaacctatgcccacttctcaactcaaccccagtgctaatgatttcaagcccatgaatactgaagaagttgtt

SEQ ID NO: 21575 - DNA, 80 bp, synthetic construct
  misc_feature 1..80: note = Synthetic: >PDF_1704_11-cand-720-799
  source 1..80: mol_type = other DNA
atcaagtttatgattcgtttgaagcctaaacggatgcatttctacattttttgcaccttctatattattcagtgctttct

SEQ ID NO: 21576 - DNA, 80 bp, synthetic construct
  misc_feature 1..80: note = Synthetic: >PDF_1704_11-cand-800-879
  source 1..80: mol_type = other DNA
attgttgttaagtcctgtctttgagtattataaccctgaaagtcccttctatcttaggggcttttcctatcttagttttg

SEQ ID NO: 21577 - DNA, 80 bp, synthetic construct
  misc_feature 1..80: note = Synthetic: >PDF_1704_11-cand-890-969
  source 1..80: mol_type = other DNA
gttaggttttattcttgctatcttttctcttgtttcagatttagtctggcaggttattgataggttttctttgaagtgtg

SEQ ID NO: 21578 - DNA, 80 bp, synthetic construct
  misc_feature 1..80: note = Synthetic: >PDF_1704_11-cand-980-1059
  source 1..80: mol_type = other DNA
taggttccttgtttgacaatggttttctttttgttgttcatcacccttgttggtgctgcaccaaccacctatagaggtag

SEQ ID NO: 21579 - DNA, 80 bp, synthetic construct
  misc_feature 1..80: note = Synthetic: >PDF_1704_11-cand-1070-1149
  source 1..80: mol_type = other DNA
ctatctccttcagccactactagctcttgttctccaacaactgctagtttatcatactatacagttttgggaccatgctt

SEQ ID NO: 21580 - DNA, 80 bp, synthetic construct
  misc_feature 1..80: note = Synthetic: >PDF_1704_11-cand-1160-1239
  source 1..80: mol_type = other DNA
aaccaactaaccagcacattgcaccttgttgatcatcgttgggtgttaaaacctcaaaacccaacgcagattgttgcaat

SEQ ID NO: 21581 - DNA, 80 bp, synthetic construct
  misc_feature 1..80: note = Synthetic: >PDF_1704_11-cand-1240-1319
  source 1..80: mol_type = other DNA
cccttacaaggttgtcattgaacaacattttatggtgcaccataatgattatggttactaccaaaatgtgctggaaattt

SEQ ID NO: 21582 - DNA, 80 bp, synthetic construct
  misc_feature 1..80: note = Synthetic: >PDF_1704_2-cand-40-119
  source 1..80: mol_type = other DNA
gacaatgctacagttccaattacaccaacaagagtcgaaactcatgttgttgaatttgaagaaagcgattatattgaacc

SEQ ID NO: 21583 - DNA, 80 bp, synthetic construct
  misc_feature 1..80: note = Synthetic: >PDF_1704_3-cand-40-119
  source 1..80: mol_type = other DNA
agtgcatttgttagcagagttagtgctgtgcgtggtactgttattattacaaaaatgggtaaaccttgtgtttactctaa

SEQ ID NO: 21584 - DNA, 80 bp, synthetic construct
  misc_feature 1..80: note = Synthetic: >PDF_1704_4-cand-0-79
  source 1..80: mol_type = other DNA
ctgccatatcatggtactcacacaaatgttgagttgaatgttactttgcagttcaaagaaaacatcatcacacttggtga

SEQ ID NO: 21585 - DNA, 80 bp, synthetic construct
  misc_feature 1..80: note = Synthetic: >PDF_1704_5-cand-160-239
  source 1..80: mol_type = other DNA
taaacctaatgctgctatagacgctgttattagtgtagcccctgaagttgattggcaatcattttatggttttccacgtg

SEQ ID NO: 21586 - DNA, 80 bp, synthetic construct
  misc_feature 1..80: note = Synthetic: >PDF_1704_6-cand-0-79
  source 1..80: mol_type = other DNA
atgacaccacttttgttaaggcatgggttgtagatcgtacacccggaccttacaacacgcagactttactctccatcaat

SEQ ID NO: 21587 - DNA, 80 bp, synthetic construct
  misc_feature 1..80: note = Synthetic: >PDF_1704_6-cand-50-129
  source 1..80: mol_type = other DNA
tacaacacgcagactttactctccatcaattccattttatggtgtggtgatttacctcacacactggcagatggttctgt

SEQ ID NO: 21588 - DNA, 80 bp, synthetic construct
  misc_feature 1..80: note = Synthetic: >PDF_1704_6-cand-170-249
  source 1..80: mol_type = other DNA
gtcttagactccactttttcatctctgtatgataaagttggtgttccttttgtcaagaatggcaaaaatttggccgaagt

SEQ ID NO: 21589 - DNA, 80 bp, synthetic construct
  misc_feature 1..80: note = Synthetic: >PDF_1704_7-cand-0-79
  source 1..80: mol_type = other DNA
ttacacagctattgtttcaagagatggaacagcccttacaccactgcttagtgtgggaatttttaaagtccccattgaac

SEQ ID NO: 21590 - DNA, 80 bp, synthetic construct
  misc_feature 1..80: note = Synthetic: >PDF_1704_7-cand-140-219
  source 1..80: mol_type = other DNA
cacaggaagaagcacaggcaatttctgactttcttgttactttacaagtgtttgaaaagcctgctgcgcctccagtacaa

SEQ ID NO: 21591 - DNA, 80 bp, synthetic construct
  misc_feature 1..80: note = Synthetic: >PDF_1704_7-cand-200-279
  source 1..80: mol_type = other DNA
ctgctgcgcctccagtacaacaaaagctagaaccaaaacctattcgtgttgaaggcaagtttaggttctacaatgataac

SEQ ID NO: 21592 - DNA, 80 bp, synthetic construct
  misc_feature 1..80: note = Synthetic: >PDF_1704_8-cand-0-79
  source 1..80: mol_type = other DNA
ctgctgtgtatgaagatcagattgttggtgttgtttctgcttctgctaatattagttacggcttcaaccaaagtgttgaa

SEQ ID NO: 21593 - DNA, 80 bp, synthetic construct
  misc_feature 1..80: note = Synthetic: >PDF_1704_8-cand-100-179
  source 1..80: mol_type = other DNA
ctccaatagtttacaaaattgcacagaccctgtactgacatatggttcagttggcatctgtagcgatggcagcattactc

SEQ ID NO: 21594 - DNA, 80 bp, synthetic construct
  misc_feature 1..80: note = Synthetic: >PDF_1704_8-cand-330-409
  source 1..80: mol_type = other DNA
gtaatggcaatgcacactgtcttcgtttgctatctcaatatgtctcggcttgtaaaaacattgaagatgctctacagctc

SEQ ID NO: 21595 - DNA, 80 bp, synthetic construct
  misc_feature 1..80: note = Synthetic: >PDF_1704_9-cand-0-79
  source 1..80: mol_type = other DNA
caagttttgctgcatctcaggtaatttcacagacccagtcaaggatggccttgctctcggagattttgatgttaacactg

SEQ ID NO: 21596 - DNA, 80 bp, synthetic construct
  misc_feature 1..80: note = Synthetic: >PDF_1704_9-cand-90-169
  source 1..80: mol_type = other DNA
tgttacagatcgtgttcttaaggaaccatggtttgttagagagctcaaggaccttattgggactgcgtggaatacttttg

SEQ ID NO: 21597 - DNA, 80 bp, synthetic construct
  misc_feature 1..80: note = Synthetic: >PDF_1704_9-cand-310-389
  source 1..80: mol_type = other DNA
gaacttttcaagagctttgttgtaacaatctttgactttactgttaacaccgtcaacattgctggtcaacagcttaaatg

SEQ ID NO: 21598 - DNA, 80 bp, synthetic construct
  misc_feature 1..80: note = Synthetic: >PDF_1704_9-cand-400-479
  source 1..80: mol_type = other DNA
tatgtgttgtttaacaatgctatagtcaaatttgttaaagttaaagtcaagggtcttcaccaggatggcatcaaacacac

SEQ ID NO: 21599 - DNA, 80 bp, synthetic construct
  misc_feature 1..80: note = Synthetic: >PDF_1704_9-cand-490-569
  source 1..80: mol_type = other DNA
accactgttgttggacagacagaaaaagtcaagtctcgtagaattgagactggcaatgaaaatttaaccattgtgtctga

SEQ ID NO: 21600 - DNA, 80 bp, synthetic construct
  misc_feature 1..80: note = Synthetic: >PDF_1704_9-cand-580-659
  source 1..80: mol_type = other DNA
gcccgcgatggcattaccaaaattattggaggcagatcattcttctgtagcggtggctattatcgccttatgagtgatgt

SEQ ID NO: 21601 - DNA, 80 bp, synthetic construct; identical to SEQ ID NO: 19411
  misc_feature 1..80: note = Synthetic: >PDF_2180_1-cand-40-119
  source 1..80: mol_type = other DNA

SEQ ID NO: 21602 - DNA, 80 bp, synthetic construct; identical to SEQ ID NO: 19412
  misc_feature 1..80: note = Synthetic: >PDF_2180_2-cand-40-119
  source 1..80: mol_type = other DNA

SEQ ID NO: 21603 - DNA, 80 bp, synthetic construct; identical to SEQ ID NO: 19413
  misc_feature 1..80: note = Synthetic: >PDF_2180_3-cand-40-119
  source 1..80: mol_type = other DNA

SEQ ID NO: 21604 - DNA, 80 bp, synthetic construct; identical to SEQ ID NO: 19414
  misc_feature 1..80: note = Synthetic: >PDF_2180_4-cand-0-79
  source 1..80: mol_type = other DNA

SEQ ID NO: 21605 - DNA, 80 bp, synthetic construct; identical to SEQ ID NO: 19415
  misc_feature 1..80: note = Synthetic: >PDF_2180_4-cand-100-179
  source 1..80: mol_type = other DNA

SEQ ID NO: 21606 - DNA, 80 bp, synthetic construct; identical to SEQ ID NO: 19416
  misc_feature 1..80: note = Synthetic: >PDF_2180_4-cand-200-279
  source 1..80: mol_type = other DNA

SEQ ID NO: 21607 - DNA, 80 bp, synthetic construct; identical to SEQ ID NO: 19417
  misc_feature 1..80: note = Synthetic: >PDF_2180_4-cand-300-379
  source 1..80: mol_type = other DNA

SEQ ID NO: 21608 - DNA, 80 bp, synthetic construct; identical to SEQ ID NO: 19418
  misc_feature 1..80: note = Synthetic: >PDF_2180_4-cand-400-479
  source 1..80: mol_type = other DNA

SEQ ID NO: 21609 - DNA, 80 bp, synthetic construct; identical to SEQ ID NO: 19419
  misc_feature 1..80: note = Synthetic: >PDF_2180_5-cand-130-209
  source 1..80: mol_type = other DNA

SEQ ID NO: 21610 - DNA, 80 bp, synthetic construct; identical to SEQ ID NO: 19420
  misc_feature 1..80: note = Synthetic: >PDF_2180_5-cand-220-299
  source 1..80: mol_type = other DNA

SEQ ID NO: 21611 - DNA, 80 bp, synthetic construct; identical to SEQ ID NO: 19421
  misc_feature 1..80: note = Synthetic: >PDF_2180_5-cand-310-389
  source 1..80: mol_type = other DNA

SEQ ID NO: 21612 - DNA, 80 bp, synthetic construct; identical to SEQ ID NO: 19422
  misc_feature 1..80: note = Synthetic: >PDF_2180_5-cand-400-479
  source 1..80: mol_type = other DNA

SEQ ID NO: 21613 - DNA, 80 bp, synthetic construct; identical to SEQ ID NO: 19423
  misc_feature 1..80: note = Synthetic: >PDF_2180_5-cand-490-569
  source 1..80: mol_type = other DNA

SEQ ID NO: 21614 - DNA, 80 bp, synthetic construct; identical to SEQ ID NO: 19424
  misc_feature 1..80: note = Synthetic: >PDF_2180_5-cand-580-659
  source 1..80: mol_type = other DNA

SEQ ID NO: 21615 - DNA, 80 bp, synthetic construct; identical to SEQ ID NO: 19425
  misc_feature 1..80: note = Synthetic: >PDF_2180_6-cand-0-79
  source 1..80: mol_type = other DNA

SEQ ID NO: 21616 - DNA, 80 bp, synthetic construct; identical to SEQ ID NO: 19426
  misc_feature 1..80: note = Synthetic: >PDF_2180_6-cand-90-169
  source 1..80: mol_type = other DNA

SEQ ID NO: 21617 - DNA, 80 bp, synthetic construct; identical to SEQ ID NO: 19427
  misc_feature 1..80: note = Synthetic: >PDF_2180_6-cand-180-259
  source 1..80: mol_type = other DNA

SEQ ID NO: 21618 - DNA, 80 bp, synthetic construct; identical to SEQ ID NO: 19428
  misc_feature 1..80: note = Synthetic: >PDF_2180_6-cand-270-349
  source 1..80: mol_type = other DNA

SEQ ID NO: 21619 - DNA, 80 bp, synthetic construct; identical to SEQ ID NO: 19429
  misc_feature 1..80: note = Synthetic: >PDF_2180_6-cand-370-449
  source 1..80: mol_type = other DNA

SEQ ID NO: 21620 - DNA, 80 bp, synthetic construct; identical to SEQ ID NO: 19430
  misc_feature 1..80: note = Synthetic: >PDF_2180_6-cand-460-539
  source 1..80: mol_type = other DNA

SEQ ID NO: 21621 - DNA, 80 bp, synthetic construct; identical to SEQ ID NO: 19431
  misc_feature 1..80: note = Synthetic: >PDF_2180_6-cand-550-629
  source 1..80: mol_type = other DNA

SEQ ID NO: 21622 - DNA, 80 bp, synthetic construct; identical to SEQ ID NO: 19432
  misc_feature 1..80: note = Synthetic: >PDF_2180_6-cand-600-679
  source 1..80: mol_type = other DNA

SEQ ID NO: 21623 - DNA, 80 bp, synthetic construct
  misc_feature 1..80: note = Synthetic: >PDF_2370_2-cand-0-79
  source 1..80: mol_type = other DNA
ccagtgctaagaagtttgattcattcaaaggtgaatgccctaaattcgtctttcctcttaactccacggttaaggttctt

SEQ ID NO: 21624 - DNA, 80 bp, synthetic construct
  misc_feature 1..80: note = Synthetic: >PDF_2370_3-cand-0-79
  source 1..80: mol_type = other DNA
taaatttgctgttacttgtactacaacaaagtttagttttgtgtgtcaggattcaactaggcatacttttcagttaagag

SEQ ID NO: 21625 - DNA, 80 bp, synthetic construct; identical to SEQ ID NO: 21623
  misc_feature 1..80: note = Synthetic: >PDF_2386_2-cand-0-79
  source 1..80: mol_type = other DNA

SEQ ID NO: 21626 - DNA, 80 bp, synthetic construct; identical to SEQ ID NO: 21624
  misc_feature 1..80: note = Synthetic: >PDF_2386_3-cand-0-79
  source 1..80: mol_type = other DNA

SEQ ID NO: 21627 - DNA, 80 bp, synthetic construct
  misc_feature 1..80: note = Synthetic: >PDF_2560_1-cand-0-79
  source 1..80: mol_type = other DNA
aaagctcaggcttgttatggtttcgctaaatggctttggctcttagtctttggctggcttaaatttaagtcagatagtac

SEQ ID NO: 21628 - DNA, 80 bp, synthetic construct
  misc_feature 1..80: note = Synthetic: >PDF_2560_1-cand-50-129
  source 1..80: mol_type = other DNA
tggctggcttaaatttaagtcagatagtactgtagtttacaccacggagatagcgtctaagatcacgcttaagttactgc

SEQ ID NO: 21629 - DNA, 80 bp, synthetic construct
  misc_feature 1..80: note = Synthetic: >PDF_2560_1-cand-180-259
  source 1..80: mol_type = other DNA
aaaggtttcttaatagtggctactgtattcctattatggtttaattttgtttatgttaatgttatttttagtgatcttta

SEQ ID NO: 21630 - DNA, 80 bp, synthetic construct
  misc_feature 1..80: note = Synthetic: >PDF_2560_2-cand-0-79
  source 1..80: mol_type = other DNA
cagcgtctatagagttggtaaaaattggcgctgataaggtttgtaattggtatattagtgagttcagctattgggtgggt

SEQ ID NO: 21631 - DNA, 80 bp, synthetic construct
  misc_feature 1..80: note = Synthetic: >PDF_2560_2-cand-150-229
  source 1..80: mol_type = other DNA
tacgtgaggatttgatagatggtgtgttaccatctaatgatgatgacgcgtggtcaaaactcaagtatgcttatgaaaac

SEQ ID NO: 21632 - DNA, 80 bp, synthetic construct
  misc_feature 1..80: note = Synthetic: >PDF_2560_2-cand-220-299
  source 1..80: mol_type = other DNA
ttatgaaaacaacacctggttctatcgctatgtgtacgataatagtttgtattttcgtgatgcatgcaaaaccagagatt

SEQ ID NO: 21633 - DNA, 80 bp, synthetic construct
  misc_feature 1..80: note = Synthetic: >PDF_2560_3-cand-0-79
  source 1..80: mol_type = other DNA
aaaattgtctaaatggcagagttagtgctgcttatcattcctctgctttgcaacctgcattgttgtatcgcaatttgcct

SEQ ID NO: 21634 - DNA, 80 bp, synthetic construct
  misc_feature 1..80: note = Synthetic: >PDF_2560_3-cand-150-229
  source 1..80: mol_type = other DNA
atgagaccacctctagtgttgacaaatgtgatctcactataggcaatgggttgtgtgttagcttttctaacaacacaaca

SEQ ID NO: 21635 - DNA, 80 bp, synthetic construct
  misc_feature 1..80: note = Synthetic: >PDF_2560_3-cand-230-309
  source 1..80: mol_type = other DNA
ccacttagaactgcacaatcaaatttttatgcacttaccaactttgagccatttcagcctaagttggtcaatgatagtgt

SEQ ID NO: 21636 - DNA, 80 bp, synthetic construct
  misc_feature 1..80: note = Synthetic: >PDF_2560_4-cand-0-79
  source 1..80: mol_type = other DNA
tgatttggaggatgctatgagtgaggcgcttttgtcccgtagtgccgtctttataaaaccaccccaacgcttgtctctaa

SEQ ID NO: 21637 - DNA, 80 bp, synthetic construct
  misc_feature 1..80: note = Synthetic: >PDF_2560_4-cand-160-239
  source 1..80: mol_type = other DNA
gcctgtggtgttggttatcacaggtccttccaattgtttgtaataagtcctgatggggtttgtcatggtaatggtgtctt

SEQ ID NO: 21638 - DNA, 80 bp, synthetic construct
  misc_feature 1..80: note = Synthetic: >PDF_2560_4-cand-230-309
  source 1..80: mol_type = other DNA
atggtgtcttcattgggtgggttgttccccttgcgtgtctagacgtggcgatccatgatttcttagaaccatgggtttta

SEQ ID NO: 21639 - DNA, 80 bp, synthetic construct
  misc_feature 1..80: note = Synthetic: >PDF_2560_5-cand-0-79
  source 1..80: mol_type = other DNA
aactatcagccgtgtcaatcctagtggttggaatcgtagatatggttttactggctttgcgcctattaatggcaaattta

SEQ ID NO: 21640 - DNA, 80 bp, synthetic construct
  misc_feature 1..80: note = Synthetic: >PDF_2560_5-cand-260-339
  source 1..80: mol_type = other DNA
ataagacctcaatcagtgttggtgagcattgtattgggataggtgttaatgaagacaagtgttctcccaataatggtgta

SEQ ID NO: 21641 - DNA, 80 bp, synthetic construct
  misc_feature 1..80: note = Synthetic: >PDF_2560_6-cand-0-79
  source 1..80: mol_type = other DNA
taagcaagttgttattgaatgacgattgctttgtttctacttatgaattgttgcaagagcttgcacttatgcgacatgat

SEQ ID NO: 21642 - DNA, 80 bp, synthetic construct
  misc_feature 1..80: note = Synthetic: >PDF_2560_6-cand-100-179
  source 1..80: mol_type = other DNA
ccgtacttatgtgcagtctatctttgatgggttgcctatggactggcgcattgttaataagtatgatattataaatggtg

SEQ ID NO: 21643 - DNA, 80 bp, synthetic construct
  misc_feature 1..80: note = Synthetic: >PDF_2560_6-cand-200-279
  source 1..80: mol_type = other DNA
gagtgtcctggtagcatatttatatgcagccagggagaaaattttggttatgtacagaatggttcttttgttaaggcatc

SEQ ID NO: 21644 - DNA, 80 bp, synthetic construct
  misc_feature 1..80: note = Synthetic: >PDF_2560_7-cand-0-79
  source 1..80: mol_type = other DNA
ttgttcattggtccatttatggtagttgtgcttttatgtggttgtcttgcttatgcagtatacctcaatcaacaaggatt

SEQ ID NO: 21645 - DNA, 80 bp, synthetic construct
  misc_feature 1..80: note = Synthetic: >PDF_2560_7-cand-110-189
  source 1..80: mol_type = other DNA
tccttctgcaagtcctgccacattggctaccactcttagtgtaccagcttcatctgtatttacgactgatgggcaggatt

SEQ ID NO: 21646 - DNA, 80 bp, synthetic construct
  misc_feature 1..80: note = Synthetic: >PDF_2560_7-cand-220-299
  source 1..80: mol_type = other DNA
ccacagtgtatcttggctatataagaggttttgattctactacctttgggcccaaaacccttaattatgtaactagttct

SEQ ID NO: 21647 - DNA, 80 bp, synthetic construct
  misc_feature 1..80: note = Synthetic: >PDF_2560_7-cand-330-409
  source 1..80: mol_type = other DNA
accttcaagcatctagtttggtttatgaggccgaccccaacaaaatggtatggatggtaggtaattctcgtctgcgttat

SEQ ID NO: 21648 - DNA, 80 bp, synthetic construct
  misc_feature 1..80: note = Synthetic: >PDF_2560_8-cand-0-79
  source 1..80: mol_type = other DNA
attcagtcccacaagataggtctcatcaggcataaaatctaaacatgctgttctttatattctttgtgtctcctgtttat

SEQ ID NO: 21649 - DNA, 80 bp, synthetic construct
  misc_feature 1..80: note = Synthetic: >PDF_2560_8-cand-90-169
  source 1..80: mol_type = other DNA
gtgatatggcctgtcctaatcctactagcaatagtgagaatgcaaagaatcctgttataagtagcgaaactgttgatgtt

SEQ ID NO: 21650 - DNA, 80 bp, synthetic construct
  misc_feature 1..80: note = Synthetic: >PDF_2560_8-cand-180-259
  source 1..80: mol_type = other DNA
ttggcacttattacattcttaaccgtgtttatcttaataccactcttgttattaatggctattacccattggacgggtct

SEQ ID NO: 21651 - DNA, 80 bp, synthetic construct
  misc_feature 1..80: note = Synthetic: >PDF_2560_8-cand-270-349
  source 1..80: mol_type = other DNA
atttatccaaccagcttagtattacgggtatttatagcactttgtctacaaaagtctatgaaaaaccctggctttctgaa

SEQ ID NO: 21652 - DNA, 80 bp, synthetic construct
  misc_feature 1..80: note = Synthetic: >PDF_2560_8-cand-360-439
  source 1..80: mol_type = other DNA
gtgtttttgctaaagtcaaaaatactaagtatatggctcgtggcaaaaaccactcggattttagtaccataatttttggc

SEQ ID NO: 21653 - DNA, 80 bp, synthetic construct
  misc_feature 1..80: note = Synthetic: >PDF_2560_8-cand-450-529
  source 1..80: mol_type = other DNA
ttaattcaacatatactgtggttgttgaatcctttaatggacattttagggtgtccgcatgtcagtacaccatgtgcatg

SEQ ID NO: 21654 - DNA, 80 bp, synthetic construct
  misc_feature 1..80: note = Synthetic: >PDF_2560_8-cand-540-619
  source 1..80: mol_type = other DNA
ctgcatgttctaatgagtcaaatattgatgcgattaggccttggaatgataccaaggttgttccatgcatttttgacaag

SEQ ID NO: 21655 - DNA, 80 bp, synthetic construct
  misc_feature 1..80: note = Synthetic: >PDF_2560_8-cand-630-709
  source 1..80: mol_type = other DNA
atgatgttaatgctgattggttttatttccattattaccaacaaggtggaactttttatatttattttactgattctggc

SEQ ID NO: 21656 - DNA, 80 bp, synthetic construct
  misc_feature 1..80: note = Synthetic: >PDF_2560_8-cand-820-899
  source 1..80: mol_type = other DNA
actgacacttagacagtacatgcttgtctttgatgcgcgtggtgttatcactgatgctgttgattgtgcaagcagtcata

SEQ ID NO: 21657 - DNA, 80 bp, synthetic construct
  misc_feature 1..80: note = Synthetic: >PDF_2560_9-cand-0-79
  source 1..80: mol_type = other DNA
tattggagcccgtgccctagtgtgtggcttccaataattaaatcttctgttaaatcatatgagaatatggtttattcagg

SEQ ID NO: 21658 - DNA, 80 bp, synthetic construct
  misc_feature 1..80: note = Synthetic: >PDF_2560_9-cand-80-159
  source 1..80: mol_type = other DNA
ggttgttggttgtaaaaccattgtaaaggaaacagatgctgtttgtcgtgcactctatttggattatgtgcaacacaagt

SEQ ID NO: 21659 - DNA, 80 bp, synthetic construct
  misc_feature 1..80: note = Synthetic: >PDF_2560_9-cand-160-239
  source 1..80: mol_type = other DNA
gtgggaatcttgaacagcgggacatacttggtatgcacgatgtgtggcacaagcagatgttaattaataggggtgattat

SEQ ID NO: 21660 - DNA, 80 bp, synthetic construct
  misc_feature 1..80: note = Synthetic: >PDF_2560_9-cand-240-319
  source 1..80: mol_type = other DNA
actacccttttggaaaatcttaatgattttaatttgaagcgcgctaggttttctctccagcatggtgttgttggcagaga

SEQ ID NO: 21661 - DNA, 80 bp, synthetic construct
  misc_feature 1..80: note = Synthetic: >PDF_2560_9-cand-320-399
  source 1..80: mol_type = other DNA
ggggtttatgccctttcttcttgatggcctggtatcgcgcagttattattatttaaaaagtggtcaaagtctgaagaata

SEQ ID NO: 21662 - DNA, 80 bp, synthetic construct
  misc_feature 1..80: note = Synthetic: >PDF_2560_9-cand-410-489
  source 1..80: mol_type = other DNA
ggttggccaagaggttattaatatgagtggtatcttgcttgagtcttcattagacatcactagtgccgctttcatctatg

SEQ ID NO: 21663 - DNA, 80 bp, synthetic construct
  misc_feature 1..80: note = Synthetic: >PDF_2560_9-cand-500-579
  source 1..80: mol_type = other DNA
tgttgacaaattgctcactaggtttaagttcttgggagttgttgttgttaacaagttgattaaatggtttaagaccgccg

SEQ ID NO: 21664 - DNA, 80 bp, synthetic construct
  misc_feature 1..80: note = Synthetic: >PDF_2560_9-cand-580-659
  source 1..80: mol_type = other DNA
ctgagaccactgctattgcatgtgcctggattttatttgaggtgctgtatggtgcatatatagtggttgatggtgcgatt

SEQ ID NO: 21665 - DNA, 80 bp, synthetic construct
  misc_feature 1..80: note = Synthetic: >PDF_2560_9-cand-660-739
  source 1..80: mol_type = other DNA
tatattactaaatctgtgcctgattatgcgcgtaaagcttacggcatttttcagactttgtttaggactgttgtgcaatg

SEQ ID NO: 21666 - DNA, 80 bp, synthetic construct
  misc_feature 1..80: note = Synthetic: >PDF_2560_9-cand-740-819
  source 1..80: mol_type = other DNA
catggctgtcaatgttaagaagggtttgtttgttataagactgggtaaagatatgctttgtcttgtagctaataaaactt

SEQ ID NO: 21667 - DNA, 80 bp, synthetic construct
  misc_feature 1..80: note = Synthetic: >PDF_2560_9-cand-830-909
  source 1..80: mol_type = other DNA
aagaggcattttgaatcaatatgtctctccagtttctatacaggaggaacaaccgtttttcttagagggagttgtggacc

SEQ ID NO: 21668 - DNA, 80 bp, synthetic construct
  misc_feature 1..80: note = Synthetic: >PDF_2560_9-cand-910-989
  source 1..80: mol_type = other DNA
ctgttttagttgcagatgatgtggtggatgttattaagacacctgtcacattctgtggtacttgcaaacctcctactatt

SEQ ID NO: 21669 - DNA, 80 bp, synthetic construct
  misc_feature 1..80: note = Synthetic: >PDF_2560_9-cand-990-1069
  source 1..80: mol_type = other DNA
gtagataagttatgtatagtggacaatatgtatatggctaagactggtgataagttgtttcccattgtggtgaatgacgc

SEQ ID NO: 21670 - DNA, 80 bp, synthetic construct
  misc_feature 1..80: note = Synthetic: >PDF_2560_9-cand-1070-1149
  source 1..80: mol_type = other DNA
taatattggccttgtagatcaaatgtggcgctttccatgtgctggtaagaaagtctctttcagtgatgtagatgatgtga

SEQ ID NO: 21671 - DNA, 80 bp, synthetic construct
  misc_feature 1..80: note = Synthetic: >PDF_2560_9-cand-1150-1229
  source 1..80: mol_type = other DNA
aggagatttcagtcacacggtcgataagaataatgtacgaccttgacccaacctttaatactgttttggagaaggcctgt

SEQ ID NO: 21672 - DNA, 80 bp, synthetic construct
  misc_feature 1..80: note = Synthetic: >PDF_2560_9-cand-1230-1309
  source 1..80: mol_type = other DNA
gcagagttctctgtggaaagtgacgttactttggaggagttgcatgatgttgtttgtgatacagtagaaagtgtgctcct

SEQ ID NO: 21673 - DNA, 80 bp, synthetic construct
  misc_feature 1..80: note = Synthetic: >PDF_2560_9-cand-1310-1389
  source 1..80: mol_type = other DNA
cccttgtctagatgttgaattgttagctgagaaagtaacagagtttatggataggtttcaatcagagcctatatatttgt

SEQ ID NO: 21674 - DNA, 80 bp, synthetic construct
  misc_feature 1..80: note = Synthetic: >PDF_2560_9-cand-1390-1469
  source 1..80: mol_type = other DNA
ttgatgaagcgggtgatgaagttatagcccctaagatgtattgttctttctcagcccctttagaggaaatatgtgatgga

SEQ ID NO: 21675 - DNA, 80 bp, synthetic construct
  misc_feature 1..80: note = Synthetic: >PDF_2560_9-cand-1470-1549
  source 1..80: mol_type = other DNA
actagtgatgaaacaccagtcattattgtcgaaacttcagttcaggaggatgacattgctaatgaggtggaggaattagt

SEQ ID NO: 21676 - DNA, 80 bp, synthetic construct
  misc_feature 1..80: note = Synthetic: >PDF_2560_9-cand-1550-1629
  source 1..80: mol_type = other DNA
tgaagcatatgatatagctaaggtagaggatactatcttggttgaactccatatggctcttaatgagcaagatgtggatg

SEQ ID NO: 21677 - DNA, 80 bp, synthetic construct
  misc_feature 1..80: note = Synthetic: >PDF_2560_9-cand-1630-1709
  source 1..80: mol_type = other DNA
taatgagtgctgagtggggtgattggattaatttttgctccgattatgatgctcagtgtgttgaagtttatggtgcatta

SEQ ID NO: 21678 - DNA, 80 bp, synthetic construct
  misc_feature 1..80: note = Synthetic: >PDF_2560_9-cand-1710-1789
  source 1..80: mol_type = other DNA
gtgcccgagcccatctttacagaggtcttgggtctctatgcacctgttgctacaagaaataattgttggttaagatctgt

SEQ ID NO: 21679 - DNA, 80 bp, synthetic construct
  misc_feature 1..80: note = Synthetic: >PDF_2560_9-cand-1790-1869
  source 1..80: mol_type = other DNA
attgttagttatgcaaaaacttccactacagtttgtagataaacagttgcaggacttgtgggtttcttacaaagagcatt

SEQ ID NO: 21680 - DNA, 80 bp, synthetic construct
  misc_feature 1..80: note = Synthetic: >PDF_2560_9-cand-1870-1949
  source 1..80: mol_type = other DNA
attctcagccttttgttgatgaaattcttaatcgtgtgcctgccactattaaaggtccactaggaggttatgttgctgat

SEQ ID NO: 21681 - DNA, 80 bp, synthetic construct
  misc_feature 1..80: note = Synthetic: >PDF_2560_9-cand-1960-2039
  source 1..80: mol_type = other DNA
ggatattaagtcagtgtcaatttgacacccatgctaagtggctgtgcttaaaatgtgataggcatttagaccttttaggt

SEQ ID NO: 21682 - DNA, 80 bp, synthetic construct
  misc_feature 1..80: note = Synthetic: >PDF_2560_9-cand-2050-2129
  source 1..80: mol_type = other DNA
tatttttttatggagacttagtctctcatgtctgtctgtgtggggaggcaatgatccttttagatgttgaggtccctttt

SEQ ID NO: 21683 - DNA, 80 bp, synthetic construct
  misc_feature 1..80: note = Synthetic: >PDF_2560_9-cand-2140-2219
  source 1..80: mol_type = other DNA
gtgtagtgcagaataaattattctgtgcttttaagacacagcgtaagtggtttatggctgcatgttgtgttaaagacagc

SEQ ID NO: 21684 - DNA, 80 bp, synthetic construct
  misc_feature 1..80: note = Synthetic: >PDF_2560_9-cand-2220-2299
  source 1..80: mol_type = other DNA
catgctatggcagttatagctgataagcaaatagatggtacttgtgttagtagttttactggtgacacatttgactttat

SEQ ID NO: 21685 - DNA, 80 bp, synthetic construct
  misc_feature 1..80: note = Synthetic: >PDF_3316_1-cand-20-99
  source 1..80: mol_type = other DNA
tgcattgctgttgagttggaaccaccttgcagattcgctgtcgagactgcaaatggtaccaccatcaagtatttgtactt

SEQ ID NO: 21686 - DNA, 80 bp, synthetic construct
  misc_feature 1..80: note = Synthetic: >PDF_3316_10-cand-0-79
  source 1..80: mol_type = other DNA
gtttgttaagggtgtcacaaacgcacataagtacgatgtgttactcactgacatggctcataacaatctgttcaccacct

SEQ ID NO: 21687 - DNA, 80 bp, synthetic construct
  misc_feature 1..80: note = Synthetic: >PDF_3316_10-cand-190-269
  source 1..80: mol_type = other DNA
tggaatgttagagatttctctatgctttcggatgaggcgcgtaagtatgttgtaaagactgctaaggcaaaaggtgtcac

SEQ ID NO: 21688 - DNA, 80 bp, synthetic construct
  misc_feature 1..80: note = Synthetic: >PDF_3316_10-cand-280-359
  source 1..80: mol_type = other DNA
acatataatgacaatgccatgaagctcgaaatacccgcgactgccattaccgtcaagtctggtgctggtgttagtgacat

SEQ ID NO: 21689 - DNA, 80 bp, synthetic construct
  misc_feature 1..80: note = Synthetic: >PDF_3316_10-cand-370-449
  source 1..80: mol_type = other DNA
ttctgtttcgtgactaaatatctgtggtggttttgcgcctgtgtgttggttgtttttatgtgcagaggcttctttgtaac

SEQ ID NO: 21690 - DNA, 80 bp, synthetic construct
  misc_feature 1..80: note = Synthetic: >PDF_3316_10-cand-450-529
  source 1..80: mol_type = other DNA
acctgcaacagctactagtatggaaggttttaatttcaggcttatcaagaatggtaaattgatagattttgtccatcctg

SEQ ID NO: 21691 - DNA, 80 bp, synthetic construct
  misc_feature 1..80: note = Synthetic: >PDF_3316_10-cand-540-619
  source 1..80: mol_type = other DNA
ttactgtgtcttcgataatttcggagagtggtacactggtcactttggtcaatccttccgtaatagtaagagctgtccta

SEQ ID NO: 21692 - DNA, 80 bp, synthetic construct
  misc_feature 1..80: note = Synthetic: >PDF_3316_10-cand-630-709
  source 1..80: mol_type = other DNA
tgttttggagtcttccaatatggtccctggtgttcccactagcgttgaggttcttggtcgccagcttatgttttatattc

SEQ ID NO: 21693 - DNA, 80 bp, synthetic construct
  misc_feature 1..80: note = Synthetic: >PDF_3316_10-cand-710-789
  source 1..80: mol_type = other DNA
aaaccgcttttagcagcagtgctaattgttatggtattgatggcattgcagagactgcatcctgtgtttttaactcagct

SEQ ID NO: 21694 - DNA, 80 bp, synthetic construct
  misc_feature 1..80: note = Synthetic: >PDF_3316_10-cand-800-879
  source 1..80: mol_type = other DNA
tcgaaggtcttggcggcaaacagacatactgctacaaatccggcatacttgattctgcaagactttacagtgaacttgta

SEQ ID NO: 21695 - DNA, 80 bp, synthetic construct
  misc_feature 1..80: note = Synthetic: >PDF_3316_10-cand-890-969
  source 1..80: mol_type = other DNA
attataagtatgatgaagacaactacattaggttgccagagaccttatttaaaggctttggtttccgtgctgttaagact

SEQ ID NO: 21696 - DNA, 80 bp, synthetic construct
  misc_feature 1..80: note = Synthetic: >PDF_3316_10-cand-980-1059
  source 1..80: mol_type = other DNA
aatattgccgcgttggtgagtgtgtcgactcttccaaaggtgtttgtgtgggacttgatagttggtttgtttttgacaag

SEQ ID NO: 21697 - DNA, 80 bp, synthetic construct
  misc_feature 1..80: note = Synthetic: >PDF_3316_11-cand-0-79
  source 1..80: mol_type = other DNA
cccgtagacaattacctgtgtggtgcagacggtcggcctgccgttcctgaagatcaatggactggcaccgacgtctttgg

SEQ ID NO: 21698 - DNA, 80 bp, synthetic construct
  misc_feature 1..80: note = Synthetic: >PDF_3316_11-cand-80-159
  source 1..80: mol_type = other DNA
cgataatactgaaattgtcgtcaatggcaccacttatgtcaaggcttggactgttgtacgtacagcagccagttatgcca

SEQ ID NO: 21699 - DNA, 80 bp, synthetic construct
  misc_feature 1..80: note = Synthetic: >PDF_3316_11-cand-160-239
  source 1..80: mol_type = other DNA
agactaacatcactggcattgaaagcatcaagtatgagtgtgacactccccaccgcttgcgcgatggatgtgttactact

SEQ ID NO: 21700 - DNA, 80 bp, synthetic construct
  misc_feature 1..80: note = Synthetic: >PDF_3316_11-cand-230-309
  source 1..80: mol_type = other DNA
tgttactactgtgcctaaacctgctaagcgtagtgctaagctggtcttggactctaagttcaacgaactgcttacgcagc

SEQ ID NO: 21701 - DNA, 80 bp, synthetic construct
  misc_feature 1..80: note = Synthetic: >PDF_3316_11-cand-320-399
  source 1..80: mol_type = other DNA
ttttgtgcagtctggtgctactttgccagctgttcttactaagcctgtgtttatgcatgcacttgtcgcgtgccagtgtg

SEQ ID NO: 21702 - DNA, 80 bp, synthetic construct
  misc_feature 1..80: note = Synthetic: >PDF_3316_11-cand-410-489
  source 1..80: mol_type = other DNA
ttggactgttggagactggactgggtttaagtcaacttgttgcggcgcacgtgctaaagtcatcacgaccgcatgtggcc

SEQ ID NO: 21703 - DNA, 80 bp, synthetic construct
  misc_feature 1..80: note = Synthetic: >PDF_3316_11-cand-500-579
  source 1..80: mol_type = other DNA
tggtgatgccgtcattgctactggtggcgccggaactggtactaagtactattcaggcatgacattgaaatttgtcgttg

SEQ ID NO: 21704 - DNA, 80 bp, synthetic construct
  misc_feature 1..80: note = Synthetic: >PDF_3316_11-cand-590-669
  source 1..80: mol_type = other DNA
tgtatcagtttggcgtgtcatcaaacttcaatctgctgatggctttgttgcttccagctcctacaatgaagatgaacatg

SEQ ID NO: 21705 - DNA, 80 bp, synthetic construct
  misc_feature 1..80: note = Synthetic: >PDF_3316_11-cand-680-759
  source 1..80: mol_type = other DNA
tgatccttactctttcgacaaagcttccagcacgcttgacaagatcaaactctgcattcttggttacaaaccagattcag

SEQ ID NO: 21706 - DNA, 80 bp, synthetic construct
  misc_feature 1..80: note = Synthetic: >PDF_3316_11-cand-880-959
  source 1..80: mol_type = other DNA
ctgcatgggatgccatgaagcaagcactctctgtactatcttacaccaatgtggcgcttcttaactttgttaagagtctg

SEQ ID NO: 21707 - DNA, 80 bp, synthetic construct
  misc_feature 1..80: note = Synthetic: >PDF_3316_11-cand-970-1049
  source 1..80: mol_type = other DNA
ctgtgaaggttgttaatggcactgttagcattgtcgttgacgtgcctagcaagtttgcagatgcatttaatgtctttaag

SEQ ID NO: 21708 - DNA, 80 bp, synthetic construct
  misc_feature 1..80: note = Synthetic: >PDF_3316_11-cand-1060-1139
  source 1..80: mol_type = other DNA
aggctgttgtttctgctgctgtggagtttgtcaagattggcgacttaaacattcgcaaacttggcaactacttgcttttt

SEQ ID NO: 21709 - DNA, 80 bp, synthetic construct
  misc_feature 1..80: note = Synthetic: >PDF_3316_11-cand-1140-1219
  source 1..80: mol_type = other DNA
gacaatgcaattgcaaaacagacaacagctaaggcacagggtgtcaaacaggctggtgctaagtctggcatctatgctaa

SEQ ID NO: 21710 - DNA, 80 bp, synthetic construct
  misc_feature 1..80: note = Synthetic: >PDF_3316_11-cand-1230-1309
  source 1..80: mol_type = other DNA
ggtgcaacccgtagtgtcattgtgaagcatttggaaatttccaatgtttcgcttgtttcggtggatgttgtacctgttag

SEQ ID NO: 21711 - DNA, 80 bp, synthetic construct
  misc_feature 1..80: note = Synthetic: >PDF_3316_12-cand-0-79
  source 1..80: mol_type = other DNA
aattttgctacacctttagtggtcctacacttcgttggcataaccataaacatgtggacaaccagattgtgtgtgtttat

SEQ ID NO: 21712 - DNA, 80 bp, synthetic construct
  misc_feature 1..80: note = Synthetic: >PDF_3316_12-cand-80-159
  source 1..80: mol_type = other DNA
ggtgtttttgctgtgtgtaaacgcttattggtggcaaggacgtactagtaatagtcgtatcagaagagacctgttacgtg

SEQ ID NO: 21713 - DNA, 80 bp, synthetic construct
  misc_feature 1..80: note = Synthetic: >PDF_3316_12-cand-170-249
  source 1..80: mol_type = other DNA
ttctcttcgtggacgtgttctttacgtacgcaaacctggtacacaacaagtgtgtggtactgatccagtttataggttct

SEQ ID NO: 21714 - DNA, 80 bp, synthetic construct
  misc_feature 1..80: note = Synthetic: >PDF_3316_12-cand-250-329
  source 1..80: mol_type = other DNA
accctggtttaccacctaacactacagccattattagtgggtatctaccatttgtaggtagttggaattgtgaggctaat

SEQ ID NO: 21715 - DNA, 80 bp, synthetic construct
  misc_feature 1..80: note = Synthetic: >PDF_3316_12-cand-330-409
  source 1..80: mol_type = other DNA
aagatttttagcgcgcatgatgctcatggtgtttttatacgatactttgacagtggtcaacgatcaggccttggcgctgg

SEQ ID NO: 21716 - DNA, 80 bp, synthetic construct
  misc_feature 1..80: note = Synthetic: >PDF_3316_12-cand-410-489
  source 1..80: mol_type = other DNA
tgtttggccatttgatcctagtgtctggcaaatgtatgtttacactttcccaggaccaggtgaatttcgtgtaaaaattt

SEQ ID NO: 21717 - DNA, 80 bp, synthetic construct
  misc_feature 1..80: note = Synthetic: >PDF_3316_12-cand-490-569
  source 1..80: mol_type = other DNA
gcaaatggcttaatgctgtggatgttgccgaccataacaatcaagtacagcatagcgtgtgtttgtatgattattacacc

SEQ ID NO: 21718 - DNA, 80 bp, synthetic construct
  misc_feature 1..80: note = Synthetic: >PDF_3316_12-cand-570-649
  source 1..80: mol_type = other DNA
cgtagctataataccggcggcagtggtgccgttactggttttactgttagtggtgatgttgttagattgtatacacctaa

SEQ ID NO: 21719 - DNA, 80 bp, synthetic construct
  misc_feature 1..80: note = Synthetic: >PDF_3316_12-cand-650-729
  source 1..80: mol_type = other DNA
tagttatcaagctatagaagtgcctggtgctaacaagtggaattacttcactgttaagtgttatgtcacaggccgttctt

SEQ ID NO: 21720 - DNA, 80 bp, synthetic construct
  misc_feature 1..80: note = Synthetic: >PDF_3316_12-cand-730-809
  source 1..80: mol_type = other DNA
gtatgcataaattcgtttataatgtcactactgctatagtagaagttgatggttatggtatagaacgcaatttcactgtg

SEQ ID NO: 21721 - DNA, 80 bp, synthetic construct
  misc_feature 1..80: note = Synthetic: >PDF_3316_12-cand-810-889
  source 1..80: mol_type = other DNA
tgtgaggattgccagggttttgatcaaaatgtttttacagtgcctcagagcggtttgataccgaatgattttagttttaa

SEQ ID NO: 21722 - DNA, 80 bp, synthetic construct
  misc_feature 1..80: note = Synthetic: >PDF_3316_12-cand-890-969
  source 1..80: mol_type = other DNA
caattggttttatcttactgatgctgctactttagttaatggtgttacgcgttctgatcaacctcttaaggttttgtgtc

SEQ ID NO: 21723 - DNA, 80 bp, synthetic construct
  misc_feature 1..80: note = Synthetic: >PDF_3316_12-cand-970-1049
  source 1..80: mol_type = other DNA
tcacgccaattccaaagggcagttctactagtttgaccgttgttaattttacagacgttggtacacattgtaatggttat

SEQ ID NO: 21724 - DNA, 80 bp, synthetic construct
  misc_feature 1..80: note = Synthetic: >PDF_3316_12-cand-1050-1129
  source 1..80: mol_type = other DNA
agacaggatggcccttttgaagcggcccgctttaaccttaattttacagaaaatgttttcaccaatggtttacagaaact

SEQ ID NO: 21725 - DNA, 80 bp, synthetic construct
  misc_feature 1..80: note = Synthetic: >PDF_3316_12-cand-1140-1219
  source 1..80: mol_type = other DNA
tttggtggctataatggcactgtatattgcactaatgacactgtttataacggcactatacctagtgattcgggtaagtc

SEQ ID NO: 21726 - DNA, 80 bp, synthetic construct
  misc_feature 1..80: note = Synthetic: >PDF_3316_12-cand-1230-1309
  source 1..80: mol_type = other DNA
ggtgtcttagatagtgcctattattgttttatgaatactactgccggtaatggatctgtcactgtctttttgggcagttt

SEQ ID NO: 21727 - DNA, 80 bp, synthetic construct
  misc_feature 1..80: note = Synthetic: >PDF_3316_12-cand-1310-1389
  source 1..80: mol_type = other DNA
gccgccagttgttagagaacttgtttttactagagatggcaggttttatcttaatggttttatgtttgctgagatgcctg

SEQ ID NO: 21728 - DNA, 80 bp, synthetic construct
  misc_feature 1..80: note = Synthetic: >PDF_3316_12-cand-1390-1469
  source 1..80: mol_type = other DNA
gtattagtgccatttatttatctcttgttacacaagaggtggcgggtttctggacaattgcttacaccaattttacagat

SEQ ID NO: 21729 - DNA, 80 bp, synthetic construct
  misc_feature 1..80: note = Synthetic: >PDF_3316_12-cand-1470-1549
  source 1..80: mol_type = other DNA
acactgcttcagcttaatggcactaacatcaatcgcatactttattgtaatgaccattactcaaagctctgttgtgacca

SEQ ID NO: 21730 - DNA, 80 bp, synthetic construct
  misc_feature 1..80: note = Synthetic: >PDF_3316_12-cand-1550-1629
  source 1..80: mol_type = other DNA
gttgtcatttgagcttgaggatgctttttatcctaatggccgttcaagtgagtatgttttacctaaaacctatgcgacgc

SEQ ID NO: 21731 - DNA, 80 bp, synthetic construct
  misc_feature 1..80: note = Synthetic: >PDF_3316_12-cand-1630-1709
  source 1..80: mol_type = other DNA
tgcccacatatgtttcacatacagacttgacagttgaattacgtggtttaggttctgtggattataaggactatgttagt

SEQ ID NO: 21732 - DNA, 80 bp, synthetic construct
  misc_feature 1..80: note = Synthetic: >PDF_3316_12-cand-1720-1799
  source 1..80: mol_type = other DNA
gttgtattaccacatcatatttcactgtcactgtaagtgcgcatgatgataatttttatggcttcaaactaggcgatact

SEQ ID NO: 21733 - DNA, 80 bp, synthetic construct
  misc_feature 1..80: note = Synthetic: >PDF_3316_12-cand-1800-1879
  source 1..80: mol_type = other DNA
acatgttcgtttgggtttgataagcttaataattatcttacttttggcagtatttgtttttataataccactatgcctgg

SEQ ID NO: 21734 - DNA, 80 bp, synthetic construct
  misc_feature 1..80: note = Synthetic: >PDF_3316_13-cand-0-79
  source 1..80: mol_type = other DNA
tgaatctgcataccaatgcattttcaagcaaccaggagtaccactgacaccactactcagtgtgggtatttttggaatac

SEQ ID NO: 21735 - DNA, 80 bp, synthetic construct
  misc_feature 1..80: note = Synthetic: >PDF_3316_13-cand-80-159
  source 1..80: mol_type = other DNA
ctatacctacttctctaaagcaactagttagtgctgctggtgataaaccatgccagtgctttgtttacagtgctaaggaa

SEQ ID NO: 21736 - DNA, 80 bp, synthetic construct
  misc_feature 1..80: note = Synthetic: >PDF_3316_13-cand-160-239
  source 1..80: mol_type = other DNA
gagaaggcagtggtggatgttcttgccaatcttaaacctcaaactgttaagcagccaaaaattgagctttcagaacctgt

SEQ ID NO: 21737 - DNA, 80 bp, synthetic construct
  misc_feature 1..80: note = Synthetic: >PDF_3316_13-cand-240-319
  source 1..80: mol_type = other DNA
aaaggtagctgaaccaaaggctgttaaagctgaggaaaaacccaaggaacagtctaagtcaaaggatagggccaaaacta

SEQ ID NO: 21738 - DNA, 80 bp, synthetic construct
  misc_feature 1..80: note = Synthetic: >PDF_3316_13-cand-320-399
  source 1..80: mol_type = other DNA
aggtaacaccatacttaacagtaggtgaccttaagttttacgacaattttacgggtatacaatctttgtaccgtaatttt

SEQ ID NO: 21739 - DNA, 80 bp, synthetic construct
  misc_feature 1..80: note = Synthetic: >PDF_3316_13-cand-400-479
  source 1..80: mol_type = other DNA
gttgtgtacactagtgcagacttgcagttagatgcctttggcaagtgtattgataaggctactaagggtttgttgtcaca

SEQ ID NO: 21740 - DNA, 80 bp, synthetic construct
  misc_feature 1..80: note = Synthetic: >PDF_3316_13-cand-480-559
  source 1..80: mol_type = other DNA
ggctatagcagattttaagcttggtacacctgaagtgcctgctggcaatgtgttacaactccagcttaaagaaggtttta

SEQ ID NO: 21741 - DNA, 80 bp, synthetic construct
  misc_feature 1..80: note = Synthetic: >PDF_3316_13-cand-560-639
  source 1..80: mol_type = other DNA
atgtgtgttgtgctgttttaccgtcttctgacgatagcaaatacagtaccaatcttaagcgcaccctcagacgacttggt

SEQ ID NO: 21742 - DNA, 80 bp, synthetic construct
  misc_feature 1..80: note = Synthetic: >PDF_3316_13-cand-640-719
  source 1..80: mol_type = other DNA
aagcttgagcaagctgtgtctggtgtttgtgcacaactctttcacattgttaaccatgtgtcagagttttgtgtttgtac

SEQ ID NO: 21743 - DNA, 80 bp, synthetic construct
  misc_feature 1..80: note = Synthetic: >PDF_3316_13-cand-730-809
  source 1..80: mol_type = other DNA
agagttatagttgatgagtttttcacacctagagtggttacggtgaaggttcaggacgtcaatggtcgtgaggttgttga

SEQ ID NO: 21744 - DNA, 80 bp, synthetic construct
  misc_feature 1..80: note = Synthetic: >PDF_3316_13-cand-810-889
  source 1..80: mol_type = other DNA
catctctgttgccgcaaaccagccacttggtgaacagcttaaaacagctgttgtcgaagccaatgtcgaagtcacaaaag

SEQ ID NO: 21745 - DNA, 80 bp, synthetic construct
  misc_feature 1..80: note = Synthetic: >PDF_3316_13-cand-900-979
  source 1..80: mol_type = other DNA
tggtgctgatgttgttgtcgcacctactattgattgggctaaccattttggctttgagggtgcagatgcattttatgtca

SEQ ID NO: 21746 - DNA, 80 bp, synthetic construct
  misc_feature 1..80: note = Synthetic: >PDF_3316_13-cand-980-1059
  source 1..80: mol_type = other DNA
tggatcattcagcttatgcttatgagagcgcttatgctaatgatctacgactgctaacagccacagacaataactgctgg

SEQ ID NO: 21747 - DNA, 80 bp, synthetic construct
  misc_feature 1..80: note = Synthetic: >PDF_3316_13-cand-1060-1139
  source 1..80: mol_type = other DNA
gttaattcgtgttgcatactcttgcagcaagcccgtgtgcagtttaaatgcttaggcatggactctatgtggaacaaatt

SEQ ID NO: 21748 - DNA, 80 bp, synthetic construct
  misc_feature 1..80: note = Synthetic: >PDF_3316_13-cand-1150-1229
  source 1..80: mol_type = other DNA
gaggttgggccttttgtgcactggttgtattatgtgctaggtaaaaccaaaggtgataagggtgatgttgaacacgcctt

SEQ ID NO: 21749 - DNA, 80 bp, synthetic construct
  misc_feature 1..80: note = Synthetic: >PDF_3316_13-cand-1230-1309
  source 1..80: mol_type = other DNA
gttggctattcgaaaacacctaaaagataatgctaccattgttgttagtcacacatcagtttgcacagattgcaacttgg

SEQ ID NO: 21750 - DNA, 80 bp, synthetic construct
  misc_feature 1..80: note = Synthetic: >PDF_3316_13-cand-1320-1399
  source 1..80: mol_type = other DNA
tgttgaatgctcagtctatgcagcacccatcaataaggagggtgctgttgtgcgtaagtgtcaacatggttttgaggtca

SEQ ID NO: 21751 - DNA, 80 bp, synthetic construct
  misc_feature 1..80: note = Synthetic: >PDF_3316_13-cand-1410-1489
  source 1..80: mol_type = other DNA
cgtgcaggctgatgggttgcctatagtggtagacttgaaacctacagccctcaatagttccactgctttaaaagctaata

SEQ ID NO: 21752 - DNA, 80 bp, synthetic construct
  misc_feature 1..80: note = Synthetic: >PDF_3316_13-cand-1490-1569
  source 1..80: mol_type = other DNA
cttataatatttatagtggtgcagctaatgcaggtcattatactgtttggtctaaggggtcattaattgatggcactaag

SEQ ID NO: 21753 - DNA, 80 bp, synthetic construct
  misc_feature 1..80: note = Synthetic: >PDF_3316_13-cand-1570-1649
  source 1..80: mol_type = other DNA
tgcgttaaagtggcctttgaagattctacagtaacagcctgtgtttgcgaaaagatgttgaccactcagcctaaagagca

SEQ ID NO: 21754 - DNA, 80 bp, synthetic construct
  misc_feature 1..80: note = Synthetic: >PDF_3316_13-cand-1650-1729
  source 1..80: mol_type = other DNA
caagtctgtggttgtcacgttaaatgagaaggcagaacagtttttctcatttggggactttgtgcgtgtcaatgtagcat

SEQ ID NO: 21755 - DNA, 80 bp, synthetic construct
  misc_feature 1..80: note = Synthetic: >PDF_3316_13-cand-1730-1809
  source 1..80: mol_type = other DNA
ctgttttggtgtggtttttttcattatttcagttgtgctttaaagcttttaaatctagagatttgaaagttttaggcggt

SEQ ID NO: 21756 - DNA, 80 bp, synthetic construct
  misc_feature 1..80: note = Synthetic: >PDF_3316_13-cand-1810-1889
  source 1..80: mol_type = other DNA
gtaccacaacgcacaggtcttataatacaacggagtcttaagtacaatatgcagggtgcagtcaatggtctcaaaggcag

SEQ ID NO: 21757 - DNA, 80 bp, synthetic construct
  misc_feature 1..80: note = Synthetic: >PDF_3316_13-cand-1890-1969
  source 1..80: mol_type = other DNA
atggtggttcgtcaagtctttaataaagcttaaattgttgtttttcacagtttacgctttgactgtactgctgtttgctt

SEQ ID NO: 21758 - DNA, 80 bp, synthetic construct
  misc_feature 1..80: note = Synthetic: >PDF_3316_13-cand-1970-2049
  source 1..80: mol_type = other DNA
acacaccgttgaataacactgtctgtttaggatatgaggcttcttatgctaattccacttttaacaagcgtgaggtctgt

SEQ ID NO: 21759 - DNA, 80 bp, synthetic construct
  misc_feature 1..80: note = Synthetic: >PDF_3316_13-cand-2050-2129
  source 1..80: mol_type = other DNA
ggtaatgatttgctttgtagagtctgtcttgatggatatgacgaacttagcgattttacacaccttactgttcagtggac

SEQ ID NO: 21760 - DNA, 80 bp, synthetic construct
  misc_feature 1..80: note = Synthetic: >PDF_3316_13-cand-2130-2209
  source 1..80: mol_type = other DNA
ttacaagcttcatgtttttgacatggcgctttggcaacttggatacttcattattatggctcttgttggtggattctaca

SEQ ID NO: 21761 - DNA, 80 bp, synthetic construct
  misc_feature 1..80: note = Synthetic: >PDF_3316_2-cand-40-119
  source 1..80: mol_type = other DNA
tcttcataacaagatcaatcttgctgatgatgctacaaccgctcaagagctgctgtgtgcattgattgcctttttcctta

SEQ ID NO: 21762 - DNA, 80 bp, synthetic construct
  misc_feature 1..80: note = Synthetic: >PDF_3316_3-cand-0-79
  source 1..80: mol_type = other DNA
ggctagcgcttttaataatgctatggatggcatcaccaatgccttgacatctattaataatgccatcaccattacgagcc

SEQ ID NO: 21763 - DNA, 80 bp, synthetic construct
  misc_feature 1..80: note = Synthetic: >PDF_3316_3-cand-120-199
  source 1..80: mol_type = other DNA
ggatgttgttaactctcaagggttgtcactgcaacatctcactacacagcttgcgcaaaattttcaggctattagtgctt

SEQ ID NO: 21764 - DNA, 80 bp, synthetic construct
  misc_feature 1..80: note = Synthetic: >PDF_3316_4-cand-0-79
  source 1..80: mol_type = other DNA
tcgcactgggttctttcctaataggcttggtcaaacataaagctgtctttgctcagattattctgatccctgctgtgctc

SEQ ID NO: 21765 - DNA, 80 bp, synthetic construct
  misc_feature 1..80: note = Synthetic: >PDF_3316_4-cand-70-149
  source 1..80: mol_type = other DNA
tgctgtgctcattgtgtgttcttgtaatgtcgcattcgactattactacactacttatgttgccggcttattggaccaga

SEQ ID NO: 21766 - DNA, 80 bp, synthetic construct
  misc_feature 1..80: note = Synthetic: >PDF_3316_4-cand-220-299
  source 1..80: mol_type = other DNA
ttttatgtggcggtttgcaactgagcgctgtgatggtgctactattgctattgccgttctcaccaccttgtttacttggt

SEQ ID NO: 21767 - DNA, 80 bp, synthetic construct
  misc_feature 1..80: note = Synthetic: >PDF_3316_5-cand-150-229
  source 1..80: mol_type = other DNA
tagtgaccctgttttatcttatggttcatttggtgtttgcgctgatggtacgtacaagctcattcagatgaatgtttcaa

SEQ ID NO: 21768 - DNA, 80 bp, synthetic construct
  misc_feature 1..80: note = Synthetic: >PDF_3316_5-cand-270-349
  source 1..80: mol_type = other DNA
acccgttaattttacagtttccattcagactgagtacatacctattactaacacacctgttagtgtggattgtcaaaatt

SEQ ID NO: 21769 - DNA, 80 bp, synthetic construct
  misc_feature 1..80: note = Synthetic: >PDF_3316_5-cand-390-469
  source 1..80: mol_type = other DNA
gcagtatgcttctgcttgtactaatatagagcgtgctctacagaatagtgctaagttagaaagccttgaacttacttcta

SEQ ID NO: 21770 - DNA, 80 bp, synthetic construct
  misc_feature 1..80: note = Synthetic: >PDF_3316_6-cand-0-79
  source 1..80: mol_type = other DNA
ctgaatgacaagaaattatggcaggaattgcccaaaaatgcagtcccgaaagggaagggcaacaaggaccagcgtatcgg

SEQ ID NO: 21771 - DNA, 80 bp, synthetic construct
  misc_feature 1..80: note = Synthetic: >PDF_3316_6-cand-200-279
  source 1..80: mol_type = other DNA
tcaatcaggtgtggtttgggttgcagtcaatggtgcaaaaacagccaacacggaacttggaactcgttccaggaaccaga

SEQ ID NO: 21772 - DNA, 80 bp, synthetic construct
  misc_feature 1..80: note = Synthetic: >PDF_3316_6-cand-290-369
  source 1..80: mol_type = other DNA
tccagaatttgacgtagaactcccagctgacattgtcattgccgatagcggtaacagctcacgaagcaattcgcgtagcc

SEQ ID NO: 21773 - DNA, 80 bp, synthetic construct
  misc_feature 1..80: note = Synthetic: >PDF_3316_6-cand-390-469
  source 1..80: mol_type = other DNA
agtagaggtggtgaagactctagacccagcagcaggaattcagatcgcggaggtcagcagaagcctcgtgctgaaaacag

SEQ ID NO: 21774 - DNA, 80 bp, synthetic construct
  misc_feature 1..80: note = Synthetic: >PDF_3316_6-cand-490-569
  source 1..80: mol_type = other DNA
cacgcggacgcaatcagaatcagaaacagcaaaatagcggtgcacccttttcgaaggatgacctcatgaatgctgtccgc

SEQ ID NO: 21775 - DNA, 80 bp, synthetic construct
  misc_feature 1..80: note = Synthetic: >PDF_3316_7-cand-0-79
  source 1..80: mol_type = other DNA
ccgttcccaaaaatcacccacgattggctggtttcctggaacaaatctgtgcctttaccaaaccatcagaggtagtcaaa

SEQ ID NO: 21776 - DNA, 80 bp, synthetic construct
  misc_feature 1..80: note = Synthetic: >PDF_3316_7-cand-90-169
  source 1..80: mol_type = other DNA
gcgctgagtctgcatcccagctcagccctcaagcacaaccatttacccctgccaacaactcccaggatgttctcccagac

SEQ ID NO: 21777 - DNA, 80 bp, synthetic construct
  misc_feature 1..80: note = Synthetic: >PDF_3316_7-cand-180-259
  source 1..80: mol_type = other DNA
aagaggtcgagattgttgatgaagttctcaattaagaaaaatgaagcttctgttgctactattcctttcagtagcctcgg

SEQ ID NO: 21778 - DNA, 80 bp, synthetic construct
  misc_feature 1..80: note = Synthetic: >PDF_3316_7-cand-270-349
  source 1..80: mol_type = other DNA
tagaaacttttgcttctttcctctgtgcaggtctggttgcagctgcaccattttagcctgtgcttagcaaagttttctat

SEQ ID NO: 21779 - DNA, 80 bp, synthetic construct
  misc_feature 1..80: note = Synthetic: >PDF_3316_7-cand-320-399
  source 1..80: mol_type = other DNA
ttttagcctgtgcttagcaaagttttctatgatattccacactcttctctcattcacctctatcatcctgaggtgaatga

SEQ ID NO: 21780 - DNA, 80 bp, synthetic construct
  misc_feature 1..80: note = Synthetic: >PDF_3316_7-cand-410-489
  source 1..80: mol_type = other DNA
cctgcttgttacaaagcccgcaagattgtgcacttgaacgtcacggaagggagcgacgtaaaattcgacttccctaccta

SEQ ID NO: 21781 - DNA, 80 bp, synthetic construct
  misc_feature 1..80: note = Synthetic: >PDF_3316_7-cand-500-579
  source 1..80: mol_type = other DNA
tttcacggctttaggtatggcacagaggttaaggatacgtgctatatgattaatgtcaactagacgatggattttcgttt

SEQ ID NO: 21782 - DNA, 80 bp, synthetic construct
  misc_feature 1..80: note = Synthetic: >PDF_3316_7-cand-590-669
  source 1..80: mol_type = other DNA
ccattaatggcacctattctacattggctactcttgtggattgagtctgctactgccttaataccgcaacttcagacagc

SEQ ID NO: 21783 - DNA, 80 bp, synthetic construct
  misc_feature 1..80: note = Synthetic: >PDF_3316_7-cand-680-759
  source 1..80: mol_type = other DNA
ggtaacgtgtggctgggtcttctttgcaaggagttctttctttacatctttatcttcctggttgttttcacgcctctata

SEQ ID NO: 21784 - DNA, 80 bp, synthetic construct
  misc_feature 1..80: note = Synthetic: >PDF_3316_8-cand-0-79
  source 1..80: mol_type = other DNA
aaacatgtttggactatttcagcttggtatagtacaacctggtaccgttgatgattcagcaccacctattgtgaagcaga

SEQ ID NO: 21785 - DNA, 80 bp, synthetic construct
  misc_feature 1..80: note = Synthetic: >PDF_3316_8-cand-100-179
  source 1..80: mol_type = other DNA
caggtcaacgtgttatcatatttgttgactagtacgtttgtggtgttctttgccacttacaagccgcgctcacatattgg

SEQ ID NO: 21786 - DNA, 80 bp, synthetic construct
  misc_feature 1..80: note = Synthetic: >PDF_3316_8-cand-190-269
  source 1..80: mol_type = other DNA
ttgcttgtacttagagtggctgccatgactctctacggcccacttgttatctaccttggtggttacatcgatggtagtgt

SEQ ID NO: 21787 - DNA, 80 bp, synthetic construct
  misc_feature 1..80: note = Synthetic: >PDF_3316_8-cand-390-469
  source 1..80: mol_type = other DNA
ctattacgacagaaagaaggatgaaaagcaattcgttacgctccatggtggtccagattatctccattttggtgatagtc

SEQ ID NO: 21788 - DNA, 80 bp, synthetic construct
  misc_feature 1..80: note = Synthetic: >PDF_3316_8-cand-490-569
  source 1..80: mol_type = other DNA
actgatcttactgttgctattagaggtagatttgatgatgatctgcccctaatacgcaatgcgacactcattgatgagtg

SEQ ID NO: 21789 - DNA, 80 bp, synthetic construct
  misc_feature 1..80: note = Synthetic: >PDF_3316_8-cand-590-669
  source 1..80: mol_type = other DNA
aagaaccagcagtaggtgttgttaatacatcattcaaccttcaactttacgaagatgttgagattagttgatgatccgtt

SEQ ID NO: 21790 - DNA, 80 bp, synthetic construct
  misc_feature 1..80: note = Synthetic: >PDF_3316_8-cand-690-769
  source 1..80: mol_type = other DNA
gggccgttattttaatgtttgtgcttcttatactatgcgtactacgcaagatgtgtcaggttgcaatcatttgccacggt

SEQ ID NO: 21791 - DNA, 80 bp, synthetic construct
  misc_feature 1..80: note = Synthetic: >PDF_3316_9-cand-0-79
  source 1..80: mol_type = other DNA
gtctacaattacagtggctggactccagttttgtaagttagatttgaaggcacctgtgctctggcttaaagatcggtggg

SEQ ID NO: 21792 - DNA, 80 bp, synthetic construct
  misc_feature 1..80: note = Synthetic: >PDF_3316_9-cand-90-169
  source 1..80: mol_type = other DNA
aaccgttgagccaactgcgggcacacctgtggatgttgaacttaaagtctttaaagtttttaaggcctacgactccgtag

SEQ ID NO: 21793 - DNA, 80 bp, synthetic construct
  misc_feature 1..80: note = Synthetic: >PDF_3316_9-cand-140-219
  source 1..80: mol_type = other DNA
ttaaagtttttaaggcctacgactccgtaggagttacagtcacacgctttgacagtgctgtgcttgagctccaagatgca

SEQ ID NO: 21794 - DNA, 80 bp, synthetic construct
  misc_feature 1..80: note = Synthetic: >PDF_3316_9-cand-230-309
  source 1..80: mol_type = other DNA
aaccagaacttacgggcactgttgttgttgtcgacgaatatgccttttacaagtctggtgtgaactattatccatacaca

SEQ ID NO: 21795 - DNA, 80 bp, synthetic construct
  misc_feature 1..80: note = Synthetic: >PDF_3316_9-cand-320-399
  source 1..80: mol_type = other DNA
ccgctaaaatttgttataagcagggtggtggtactgttacattttctgaagaagttcaggaaattgagattgacagagtc

SEQ ID NO: 21796 - DNA, 80 bp, synthetic construct
  misc_feature 1..80: note = Synthetic: >PDF_3316_9-cand-410-489
  source 1..80: mol_type = other DNA
agctcaagtatgagtttgagaatgaagacattgtcaatgtgctagaacgcatcatgggcacttccctttcacacagtggt

SEQ ID NO: 21797 - DNA, 80 bp, synthetic construct
  misc_feature 1..80: note = Synthetic: >PDF_3316_9-cand-500-579
  source 1..80: mol_type = other DNA
atgtgttcgaggatgccattcgtagcgctattggtctaattgcgaaacaaatgaccatgccagaattctacatttatgat

SEQ ID NO: 21798 - DNA, 80 bp, synthetic construct
  misc_feature 1..80: note = Synthetic: >PDF_3316_9-cand-590-669
  source 1..80: mol_type = other DNA
gtaatgacttgtccaggaccatcatgatctcgcaatggcctattcaggaagactcagataataaccctgaggaagatcaa

SEQ ID NO: 21799 - DNA, 80 bp, synthetic construct
  misc_feature 1..80: note = Synthetic: >PDF_3316_9-cand-680-759
  source 1..80: mol_type = other DNA
gcgatgacgacaatgagtttgacggcatcgttgaagttgtggacgaactttttccatcagacgaaagtgccgcagataag

SEQ ID NO: 21800 - DNA, 80 bp, synthetic construct
  misc_feature 1..80: note = Synthetic: >PDF_3316_9-cand-770-849
  source 1..80: mol_type = other DNA
acgatgatgatgttgttgacgtcatatctgaagatgcaaacccgtcggatgaacaggccaaagtggcagatgagttcggc

SEQ ID NO: 21801 - DNA, 80 bp, synthetic construct
  misc_feature 1..80: note = Synthetic: >PDF_3316_9-cand-860-939
  source 1..80: mol_type = other DNA
cgccaccagttgttacagtgtcaccttttgcctatgcttataatgagcttaatggcattaaagtcttaaaacaagactct

SEQ ID NO: 21802 - DNA, 80 bp, synthetic construct
  misc_feature 1..80: note = Synthetic: >PDF_3316_9-cand-950-1029
  source 1..80: mol_type = other DNA
gggttaatgctgtgtgctaccagctacaaatgttggatgtcttaaaggatgacgcttttgacctcttcagagctggccgt

SEQ ID NO: 21803 - DNA, 80 bp, synthetic construct
  misc_feature 1..80: note = Synthetic: >PRD_0038_1-cand-20-99
  source 1..80: mol_type = other DNA
tacacccactgttggtgttggttatcaaccatacagagtggttgttctttcatttgaattgctaaacgcacctgctacag

SEQ ID NO: 21804 - DNA, 80 bp, synthetic construct; identical to SEQ ID NO: 21623
  misc_feature 1..80: note = Synthetic: >PRD_0038_3-cand-0-79
  source 1..80: mol_type = other DNA

SEQ ID NO: 21805 - DNA, 80 bp, synthetic construct; identical to SEQ ID NO: 21624
  misc_feature 1..80: note = Synthetic: >PRD_0038_4-cand-0-79
  source 1..80: mol_type = other DNA

SEQ ID NO: 21806 - DNA, 80 bp, synthetic construct
  misc_feature 1..80: note = Synthetic: >SBB_010_1-cand-0-79
  source 1..80: mol_type = other DNA
tgagtggtattgtgaccaatggactaatgttaatgatagtacacctgatggtcttggcacagggataggtttttatgcac

SEQ ID NO: 21807 - DNA, 80 bp, synthetic construct
  misc_feature 1..80: note = Synthetic: >SBB_010_1-cand-110-189
  source 1..80: mol_type = other DNA
gccagggtggtggtggtggttacactattagtgtgtccccaactaaacctaaccaaaattcttggcaattgtggcttcat

SEQ ID NO: 21808 - DNA, 80 bp, synthetic construct; identical to SEQ ID NO: 21806
  misc_feature 1..80: note = Synthetic: >SBB_024_1-cand-0-79
  source 1..80: mol_type = other DNA

SEQ ID NO: 21809 - DNA, 80 bp, synthetic construct; identical to SEQ ID NO: 21807
  misc_feature 1..80: note = Synthetic: >SBB_024_1-cand-110-189
  source 1..80: mol_type = other DNA

SEQ ID NO: 21810 - DNA, 80 bp, synthetic construct
  misc_feature 1..80: note = Synthetic: >SBB_041_1-cand-0-79
  source 1..80: mol_type = other DNA
gctgtatgttgggtctcaagttaaatacgttcgcatccttggtcaagtgtacgaagtgcagtcttgttatgaagcatctt

SEQ ID NO: 21811 - DNA, 80 bp, synthetic construct
  misc_feature 1..80: note = Synthetic: >SBB_041_1-cand-120-199
  source 1..80: mol_type = other DNA
ttataggagtttcaactgcgaccatattaacactatgagacaaagagctaacatgcggtctgtaatacccaacaatggtg

SEQ ID NO: 21812 - DNA, 80 bp, synthetic construct
  misc_feature 1..80: note = Synthetic: >SBB_041_2-cand-110-189
  source 1..80: mol_type = other DNA
aacggcagttatcctacgcatgccatcaagtcttatatgtttggcattacatggtataacgatcttgtacgtattgtttt

SEQ ID NO: 21813 - DNA, 80 bp, synthetic construct
  misc_feature 1..80: note = Synthetic: >SBB_041_2-cand-210-289
  source 1..80: mol_type = other DNA
tacaattacaagggttgctatgggaagtcgtgcgttataccgggcctgttagtgctggcagaacaacaaagtttaacgta

SEQ ID NO: 21814 - DNA, 80 bp, synthetic construct
  misc_feature 1..80: note = Synthetic: >SBB_041_2-cand-310-389
  source 1..80: mol_type = other DNA
gcttgttaatacggattccaagggtgctgttacaaaatatgtctattgcaatgatggttttgtcaatgctctgcaatgta

SEQ ID NO: 21815 - DNA, 80 bp, synthetic construct
  misc_feature 1..80: note = Synthetic: >SBB_041_2-cand-410-489
  source 1..80: mol_type = other DNA
cctgctggtgtttactctaacacagaagttgagtacccgtctgccatttacactgtcacacacaatatgtctgattgccc

SEQ ID NO: 21816 - DNA, 80 bp, synthetic construct; identical to SEQ ID NO: 21810
  misc_feature 1..80: note = Synthetic: >SBB_053_1-cand-0-79
  source 1..80: mol_type = other DNA

SEQ ID NO: 21817 - DNA, 80 bp, synthetic construct; identical to SEQ ID NO: 21811
  misc_feature 1..80: note = Synthetic: >SBB_053_1-cand-120-199
  source 1..80: mol_type = other DNA

SEQ ID NO: 21818 - DNA, 80 bp, synthetic construct; identical to SEQ ID NO: 21812
  misc_feature 1..80: note = Synthetic: >SBB_053_2-cand-110-189
  source 1..80: mol_type = other DNA

SEQ ID NO: 21819 - DNA, 80 bp, synthetic construct; identical to SEQ ID NO: 21813
  misc_feature 1..80: note = Synthetic: >SBB_053_2-cand-210-289
  source 1..80: mol_type = other DNA

SEQ ID NO: 21820 - DNA, 80 bp, synthetic construct; identical to SEQ ID NO: 21814
  misc_feature 1..80: note = Synthetic: >SBB_053_2-cand-310-389
  source 1..80: mol_type = other DNA

SEQ ID NO: 21821 - DNA, 80 bp, synthetic construct; identical to SEQ ID NO: 21815
  misc_feature 1..80: note = Synthetic: >SBB_053_2-cand-410-489
  source 1..80: mol_type = other DNA

SEQ ID NO: 21822 - DNA, 80 bp, synthetic construct
  misc_feature 1..80: note = Synthetic: >SBB_120_1-cand-0-79
  source 1..80: mol_type = other DNA
gtggattgctgagtacgtctctagcggcgcttttgtgtgtcagcaaaaccctgaagagccacaggttgataagtgtgtaa

SEQ ID NO: 21823 - DNA, 80 bp, synthetic construct
  misc_feature 1..80: note = Synthetic: >SBB_120_1-cand-130-209
  source 1..80: mol_type = other DNA
tacacactgtcacgtttttataatattttgtacgtgggtgcacaggttaagtatgtgcgcattctaagcaaggtttacga

SEQ ID NO: 21824 - DNA, 80 bp, synthetic construct
  misc_feature 1..80: note = Synthetic: >SBB_120_2-cand-0-79
  source 1..80: mol_type = other DNA
gattggtactgtggctcttggactaagccaggtgatggtacaccagatggctcaggtgccggcattggcttttatgccca

SEQ ID NO: 21825 - DNA, 80 bp, synthetic construct
  misc_feature 1..80: note = Synthetic: >SBB_120_2-cand-100-179
  source 1..80: mol_type = other DNA
ccaataatgatggtggaggttacacatttagtgtttctccagttaagcctaaccagaattcatggcaattgtgggttcac

SEQ ID NO: 21826 - DNA, 80 bp, synthetic construct
  misc_feature 1..80: note = Synthetic: >SBB_120_2-cand-200-279
  source 1..80: mol_type = other DNA
tggcgtaactgttcgtttgtgtaagtggtttactcaaaccttatttaataacactgcttacaaccaagatgcaggtcctg

SEQ ID NO: 21827 - DNA, 80 bp, synthetic construct
  misc_feature 1..80: note = Synthetic: >SBB_120_2-cand-300-379
  source 1..80: mol_type = other DNA
ataaatggcacctatccttcgcatagacggctgtcgtacatgtttggcattacttggtataatgatttggttcgtatagt

SEQ ID NO: 21828 - DNA, 80 bp, synthetic construct
  misc_feature 1..80: note = Synthetic: >SBB_120_2-cand-350-429
  source 1..80: mol_type = other DNA
tacttggtataatgatttggttcgtatagttttcccacctactgtcttggaattgcaattgcaaggtttgttgtgggaag

SEQ ID NO: 21829 - DNA, 80 bp, synthetic construct
  misc_feature 1..80: note = Synthetic: >SBB_120_2-cand-450-529
  source 1..80: mol_type = other DNA
gtcagtggcggtaatactactgcctttaatgtggtcaagagtgtttctagtgttcttgtcaacactgactctgatggttc

SEQ ID NO: 21830 - DNA, 80 bp, synthetic construct
  misc_feature 1..80: note = Synthetic: >SBB_120_2-cand-550-629
  source 1..80: mol_type = other DNA
gtaatgatggttttgttaacgcacttcaatgcaaacatttaacctttagtttggatgcaggggtgtattctaactctgag

SEQ ID NO: 21831 - DNA, 80 bp, synthetic construct
  misc_feature 1..80: note = Synthetic: >SBB_122_1-cand-0-79
  source 1..80: mol_type = other DNA
aactacagttattactggcgcatttccttccacaaaaccatcggattggtattgtggcaagtggactactccaacagaca

SEQ ID NO: 21832 - DNA, 80 bp, synthetic construct
  misc_feature 1..80: note = Synthetic: >SBB_122_1-cand-80-159
  source 1..80: mol_type = other DNA
gtacacctgatggcattgaatccggcattggcttttatgcacagacagctgattctgcttatgaaaattctggtggtggt

SEQ ID NO: 21833 - DNA, 80 bp, synthetic construct
  misc_feature 1..80: note = Synthetic: >SBB_122_1-cand-160-239
  source 1..80: mol_type = other DNA
ggttatactgtaagtgtgtcacctactaagcccacgcagaattcatggcaattgtggattcatagggcatggggtgaaaa

SEQ ID NO: 21834 - DNA, 80 bp, synthetic construct
  misc_feature 1..80: note = Synthetic: >SBB_122_1-cand-240-319
  source 1..80: mol_type = other DNA
tcgtggtgtcactgttcgtttgtgcaagtggtttactacagccaagtttaataaaactggttttaatgatgatgctgatg

SEQ ID NO: 21835 - DNA, 80 bp, synthetic construct
  misc_feature 1..80: note = Synthetic: >SBB_122_1-cand-320-399
  source 1..80: mol_type = other DNA
ctggcagtgcgtatgaatgcctcataaatggcacatatccttctcatagacgtttgtcttacatgtttggaatcacatgg

SEQ ID NO: 21836 - DNA, 80 bp, synthetic construct
  misc_feature 1..80: note = Synthetic: >SBB_122_1-cand-410-489
  source 1..80: mol_type = other DNA
ttgtgcgcataatctttccaccaactgttttagagttacaattacaaggtttactttgggaagttgtacgctttaccagt

SEQ ID NO: 21837 - DNA, 80 bp, synthetic construct
  misc_feature 1..80: note = Synthetic: >SBB_122_1-cand-490-569
  source 1..80: mol_type = other DNA
ccaattagtgcagacaaatctaccggcttcaatattgtaaaggatgtttctagtgtacttgttaacacagaccagagtgg

SEQ ID NO: 21838 - DNA, 80 bp, synthetic construct
  misc_feature 1..80: note = Synthetic: >SBB_122_1-cand-570-649
  source 1..80: mol_type = other DNA
taatgtgaacaggtacgtctattgcaatgatgggtttgttaacgcccttcaatgtaaacatctcacttttagtttggatg

SEQ ID NO: 21839 - DNA, 80 bp, synthetic construct
  misc_feature 1..80: note = Synthetic: >SBB_122_1-cand-650-729
  source 1..80: mol_type = other DNA
ctggtgtgtactctaattcagaagttgaatatccttctgccatttatactgtgacacacaatatgtctgtttgtcctgaa

SEQ ID NO: 21840 - DNA, 80 bp, synthetic construct
  misc_feature 1..80: note = Synthetic: >SBB_122_1-cand-730-809
  source 1..80: mol_type = other DNA
gcgccagactttcctgcagattcctcatttattaagcgcttggttttttccaattgtgtggtcaactatactaattgggt

SEQ ID NO: 21841 - DNA, 80 bp, synthetic construct
  misc_feature 1..80: note = Synthetic: >SBB_122_1-cand-810-889
  source 1..80: mol_type = other DNA
tcaaaacattactgcaaaccaacatttggttcttcctaatggtaagtttaacccttttactgagtgtagtggagttaatc

SEQ ID NO: 21842 - DNA, 80 bp, synthetic construct
  misc_feature 1..80: note = Synthetic: >SBB_122_1-cand-890-969
  source 1..80: mol_type = other DNA
acataattggtaactgtgtgcctggttttgtgttgcgttatagtaggggtgtttctgtagatgattctgtcaaaacgcca

SEQ ID NO: 21843 - DNA, 80 bp, synthetic construct
  misc_feature 1..80: note = Synthetic: >SBB_122_1-cand-970-1049
  source 1..80: mol_type = other DNA
tttctttcaccgggttcttgttttggttgggagtggactaacaggtccactcacagttataaatggtggatagctgagta

SEQ ID NO: 21844 - DNA, 80 bp, synthetic construct
  misc_feature 1..80: note = Synthetic: >SBB_122_1-cand-1050-1129
  source 1..80: mol_type = other DNA
tgtttctaatggcgcttttgtgtgtcaacaaaacccttcaaccccggaggttgataagtgtgtcacctatacagtagaaa

SEQ ID NO: 21845 - DNA, 80 bp, synthetic construct
  misc_feature 1..80: note = Synthetic: >SBB_122_1-cand-1130-1209
  source 1..80: mol_type = other DNA
aggtcacattccaaggagttcttaaacatagcaattactcactcgcgcaattttacaacattttgtatgttggtgcacag

SEQ ID NO: 21846 - DNA, 80 bp, synthetic construct
  misc_feature 1..80: note = Synthetic: >SBB_122_1-cand-1210-1289
  source 1..80: mol_type = other DNA
gtcaaatatgtgcgtatccttggtcaggtctatgaagttcaatcatgctatgaggcatcttatgatgtcttgtatcgtaa

SEQ ID NO: 21847 - DNA, 80 bp, synthetic construct
  misc_feature 1..80: note = Synthetic: >SBB_122_1-cand-1290-1369
  source 1..80: mol_type = other DNA
taatgaaacttacggtctactttatagaagttttgactgttcgcacattaacagtttgcgttctagagccaagatgcggt

SEQ ID NO: 21848 - DNA, 80 bp, synthetic construct
  misc_feature 1..80: note = Synthetic: >SBB_747_1-cand-40-119
  source 1..80: mol_type = other DNA
acttacaacttcactggtttgctaggctgtgttgggtctaagtgtaatgaccacactacttaccggtcagcactttctga

SEQ ID NO: 21849 - DNA, 80 bp, synthetic construct
  misc_feature 1..80: note = Synthetic: >SBB_747_2-cand-20-99
  source 1..80: mol_type = other DNA
ctacattgtgtgcttacccatcgtttaaccgttggggtccagcatctagtttttatactaataatgcttttgttgtgcat

SEQ ID NO: 21850 - DNA, 80 bp, synthetic construct
  misc_feature 1..80: note = Synthetic: >SBB_747_3-cand-40-119
  source 1..80: mol_type = other DNA
tttcagataatagtactagtgacattgtcacttttgatactttgtctggttgcgttcataacgttataaacgcaactagt

SEQ ID NO: 21851 - DNA, 80 bp, synthetic construct; identical to SEQ ID NO: 17639
  misc_feature 1..80: note = Synthetic: >SBB_747_4-cand-0-79
  source 1..80: mol_type = other DNA

SEQ ID NO: 21852 - DNA, 80 bp, synthetic construct
  misc_feature 1..80: note = Synthetic: >SBB_797_2-cand-20-99
  source 1..80: mol_type = other DNA
attaacaacacttttacaatccctattaacacatctagactgaatttagggtttcgttttagtgatggtaatttatatct

SEQ ID NO: 21853 - DNA, 80 bp, synthetic construct
  misc_feature 1..80: note = Synthetic: >SBB_797_3-cand-20-99
  source 1..80: mol_type = other DNA
tacaaatttctcagcagggtgctatgtgcaatgtgccctataaggacattgccaacccaccccaacctatagtttggcgc

SEQ ID NO: 21854 - DNA, 80 bp, synthetic construct
  misc_feature 1..80: note = Synthetic: >SBB_797_5-cand-0-79
  source 1..80: mol_type = other DNA
tatatcgctaaagccggcatcaggcactaagttggtttgtcctagtactaatgatacagccatgataactagggagtgtg

SEQ ID NO: 21855 - DNA, 80 bp, synthetic construct
  misc_feature 1..80: note = Synthetic: >SBB_797_5-cand-90-169
  source 1..80: mol_type = other DNA
cctttatggttatactggtacgggtgtgttcaatgaaagttctttgaccatacctgactcgaagttatttgtagctagtt

SEQ ID NO: 21856 - DNA, 80 bp, synthetic construct
  misc_feature 1..80: note = Synthetic: >SBB_797_5-cand-180-259
  source 1..80: mol_type = other DNA
tattatagccgctactgtaaataataaggtttatagtatatcgccttgtgtatcagtaccggtatctgtagggtacgacc

SEQ ID NO: 21857 - DNA, 80 bp, synthetic construct
  misc_feature 1..80: note = Synthetic: >SBB_797_5-cand-230-309
  source 1..80: mol_type = other DNA
tatcagtaccggtatctgtagggtacgacccaaattttgagcgtgccctattatttaatgggttagcttgtagtgagcgt

SEQ ID NO: 21858 - DNA, 80 bp, synthetic construct
  misc_feature 1..80: note = Synthetic: >SBB_797_5-cand-320-399
  source 1..80: mol_type = other DNA
ttagtttaccggcctctgaattctggttgtcagctgttgcggacaatgtttctaatggtgtagtgacatttgacacttta

SEQ ID NO: 21859 - DNA, 80 bp, synthetic construct
  misc_feature 1..80: note = Synthetic: >SBB_797_5-cand-410-489
  source 1..80: mol_type = other DNA
ttcataatgtcattaatgccacagaagttgttgtttcctcatgtcaaatgcctttaggaaacagcttatgtttggccaat

SEQ ID NO: 21860 - DNA, 80 bp, synthetic construct
  misc_feature 1..80: note = Synthetic: >SBB_797_5-cand-500-579
  source 1..80: mol_type = other DNA
tagcttatgtggctagccgtactattggtaagcagctccttagtttggtcacttatgaccctacttatactcaaggtgtt

SEQ ID NO: 21861 - DNA, 80 bp, synthetic construct
  misc_feature 1..80: note = Synthetic: >SBB_797_5-cand-590-669
  source 1..80: mol_type = other DNA
cacctgtttattggatcagtgttcctacaaattttactttgagtgctgtgtcagagtacatacagacaacttcccctaaa

SEQ ID NO: 21862 - DNA, 80 bp, synthetic construct
  misc_feature 1..80: note = Synthetic: >SBB_797_5-cand-690-769
  source 1..80: mol_type = other DNA
atatttatgtggtgattcggcgcgttgtacgactgtactcatgcagtacggtacattttgtgatgatgttaataaggcat

SEQ ID NO: 21863 - DNA, 80 bp, synthetic construct
  misc_feature 1..80: note = Synthetic: >SBB_797_5-cand-780-859
  source 1..80: mol_type = other DNA
tagtgctataatagatagtagcatggtatcgctagtgtctgaaattactgctgacgttgtacgtagtgaaaacgcattgt

SEQ ID NO: 21864 - DNA, 80 bp, synthetic construct
  misc_feature 1..80: note = Synthetic: >SBB_797_5-cand-870-949
  source 1..80: mol_type = other DNA
atataactttacaggtcttttagggtgcgttggttccacatgtaacgatcgcactatgtacaggtcagcactttcggatt

SEQ ID NO: 21865 - DNA, 80 bp, synthetic construct
  misc_feature 1..80: note = Synthetic: >SBB_943_1-cand-40-119
  source 1..80: mol_type = other DNA
attacaatttcactggcttaatgggttgtttagggcctcaatgtagtgcaactacgtataggtctgccttttcagacttg

SEQ ID NO: 21866 - DNA, 80 bp, synthetic construct
  misc_feature 1..80: note = Synthetic: >SBB_943_2-cand-0-79
  source 1..80: mol_type = other DNA
taatgatggtgctataccagtacagttatctggtggtatacctaagggtttctacgctgagggtcgtggctctcgcggta

SEQ ID NO: 21867 - DNA, 80 bp, synthetic construct
  misc_feature 1..80: note = Synthetic: >SBB_943_2-cand-100-179
  source 1..80: mol_type = other DNA
aactcgagtagagcttcgtcacgtggtaactcgcgcgctagctcccgcggcgcttcacccggtaggcctgctgctaatcc

SEQ ID NO: 21868 - DNA, 80 bp, synthetic construct
  misc_feature 1..80: note = Synthetic: >SBB_943_3-cand-140-219
  source 1..80: mol_type = other DNA
tgaagcttttagagattttgtccgtacggaagaagagcgttttgctcagttttgcggtaaagtgtgtgcacctataaata

SEQ ID NO: 21869 - DNA, 80 bp, synthetic construct
  misc_feature 1..80: note = Synthetic: >SBB_943_4-cand-0-79
  source 1..80: mol_type = other DNA
gtgttattaagtgcaacagctgcattggcatctagaccacagtgttttaccggtgtgacgttagagcctaagactcatgt

SEQ ID NO: 21870 - DNA, 80 bp, synthetic construct
  misc_feature 1..80: note = Synthetic: >SBB_943_4-cand-150-229
  source 1..80: mol_type = other DNA
ggtcaaaccttgaggcagaatttatttatggctgatatgtctcgacttattttgtaccccattacaccaccttcaaaaga

SEQ ID NO: 21871 - DNA, 80 bp, synthetic construct
  misc_feature 1..80: note = Synthetic: >SBB_943_4-cand-210-289
  source 1..80: mol_type = other DNA
attacaccaccttcaaaagacgcaaatagtggttattcgtataataccaccattttgaatgtgaccaatggtttctttgt

SEQ ID NO: 21872 - DNA, 80 bp, synthetic construct
  misc_feature 1..80: note = Synthetic: >SBB_943_5-cand-0-79
  source 1..80: mol_type = other DNA
atagtgcgtcccaagagcttttttgtgtaactggctcatttaatccacccacgggtgtttacccacttagtcgctataga

SEQ ID NO: 21873 - DNA, 80 bp, synthetic construct
  misc_feature 1..80: note = Synthetic: >SBB_943_5-cand-70-149
  source 1..80: mol_type = other DNA
tcgctatagagcacaagttgctggttacatacatgtcactcaacaaggtgatcaatgtgacccgccctatgtgcagcttc

SEQ ID NO: 21874 - DNA, 80 bp, synthetic construct
  misc_feature 1..80: note = Synthetic: >SBB_943_5-cand-150-229
  source 1..80: mol_type = other DNA
aggagccaccgcaaccaatagtttggaagcggtttatgttacgtaactgtgcctttgattttggcatagttatggagaat

SEQ ID NO: 21875 - DNA, 80 bp, synthetic construct
  misc_feature 1..80: note = Synthetic: >SBB_943_5-cand-230-309
  source 1..80: mol_type = other DNA
ttacccacttatcgtttgcagtgtagtggcatttctcctagtaggcttatgtctatgtgttatagtagtgtcactattga

SEQ ID NO: 21876 - DNA, 80 bp, synthetic construct
  misc_feature 1..80: note = Synthetic: >SBB_943_5-cand-310-389
  source 1..80: mol_type = other DNA
cactatgcgtattaattctacgcacctaaacaaccttttgacaggtgtaccagatgcgtttagcacttataattatgctt

SEQ ID NO: 21877 - DNA, 80 bp, synthetic construct
  misc_feature 1..80: note = Synthetic: >SBB_943_5-cand-390-469
  source 1..80: mol_type = other DNA
tacctaagaatttttatggttgcatacatgcatactatttgaatgtgactggtgcatacgctgtagcgtcgcagaaccgt

SEQ ID NO: 21878 - DNA, 80 bp, synthetic construct
  misc_feature 1..80: note = Synthetic: >SBB_943_5-cand-480-559
  source 1..80: mol_type = other DNA
gaggtcggcagagtaatatttattatattaacactgttttagagagcgctaagtatatagacaagtctttgctctttggt

SEQ ID NO: 21879 - DNA, 80 bp, synthetic construct
  misc_feature 1..80: note = Synthetic: >SBB_943_5-cand-560-639
  source 1..80: mol_type = other DNA
ctaactattatcacgcttaaaccatcatctggtaacaagctggtttgtccattggctaatgacacggctgtcatcgtaga

SEQ ID NO: 21880 - DNA, 80 bp, synthetic construct
  misc_feature 1..80: note = Synthetic: >SBB_943_5-cand-650-729
  source 1..80: mol_type = other DNA
cagtttaacctttatggttatacgggtacgggcgtgttgtctacgaatacgtctctaagtatccctaatggtaaggtttt

SEQ ID NO: 21881 - DNA, 80 bp, synthetic construct
  misc_feature 1..80: note = Synthetic: >SBB_943_5-cand-740-819
  source 1..80: mol_type = other DNA
agtacaggttctataataggtgtccttattaatggcactacttatagtattaaaccttgtgttacagtacccgtctcggt

SEQ ID NO: 21882 - DNA, 80 bp, synthetic construct
  misc_feature 1..80: note = Synthetic: >SBB_943_5-cand-820-899
  source 1..80: mol_type = other DNA
aggttatcatgccaattatcagagggtacttttatttaatggtctgtcatgcgatcaacgcgcgatggctgttactcaac

SEQ ID NO: 21883 - DNA, 80 bp, synthetic construct
  misc_feature 1..80: note = Synthetic: >SBB_943_5-cand-900-979
  source 1..80: mol_type = other DNA
cagcgtcatctacatggactgctgctgcgttagatactagtgttgtagatactccatcaggttgtgttctcaatgctatt

SEQ ID NO: 21884 - DNA, 80 bp, synthetic construct
  misc_feature 1..80: note = Synthetic: >SBB_943_5-cand-960-1039
  source 1..80: mol_type = other DNA
gttgtgttctcaatgctatttataataatgaaactattgttaatacatgtactatgcctttaggtaatagtttatgcctt

SEQ ID NO: 21885 - DNA, 80 bp, synthetic construct
  misc_feature 1..80: note = Synthetic: >SBB_943_6-cand-0-79
  source 1..80: mol_type = other DNA
gtgatgaaaccgtttatgaagatgaggacgaccgtccaaagacccagaggagacataagaagagaggatcaactgcctct

SEQ ID NO: 21886 - DNA, 80 bp, synthetic construct
  misc_feature 1..80: note = Synthetic: >SBB_943_6-cand-90-169
  source 1..80: mol_type = other DNA
ttgcggaccctactaatgcaggtgccgaaagatcttagggtttttactgttggtttttctccttaagatgtttgaacgaa

SEQ ID NO: 21887 - DNA, 80 bp, synthetic construct
  misc_feature 1..80: note = Synthetic: >SBB_943_6-cand-180-259
  source 1..80: mol_type = other DNA
tttctgctttgttgcttttttctcccatgttttcaagctattaatctaggtcttacggtcctagaaatttgtaccacagg

SEQ ID NO: 21888 - DNA, 80 bp, synthetic construct
  misc_feature 1..80: note = Synthetic: >SBB_943_6-cand-260-339
  source 1..80: mol_type = other DNA
aacatgtgtttcacagtcagcgtcctgtgctactggtgacattgttaatgtcacccaggttgaccgtacacatgttgtta

SEQ ID NO: 21889 - DNA, 80 bp, synthetic construct
  misc_feature 1..80: note = Synthetic: >SBB_943_6-cand-350-429
  source 1..80: mol_type = other DNA
cttccgccatattaggtacactgatgttggccgtactttcaggattaagttttctgatatcacttgctcctgggaaaata

SEQ ID NO: 21890 - DNA, 80 bp, synthetic construct
  misc_feature 1..80: note = Synthetic: >SBB_943_6-cand-430-509
  source 1..80: mol_type = other DNA
cgagtccagctgacattgtgcttcgtggcagccacattttgcaatttactgttttaggtgtttgttttgataataaagtt

SEQ ID NO: 21891 - DNA, 80 bp, synthetic construct
  misc_feature 1..80: note = Synthetic: >SBB_943_6-cand-520-599
  source 1..80: mol_type = other DNA
gtcagaatatcaatgagccctgcccagaacaccacacggtgtttcatttgcagcgcgatgatataacattgcttgagcta

SEQ ID NO: 21892 - DNA, 80 bp, synthetic construct
  misc_feature 1..80: note = Synthetic: >SBB_943_6-cand-690-769
  source 1..80: mol_type = other DNA
acactacctcctcatgaggttgtagatgaagattattgaacgaacatggaccctgcatttggtaatgcattagctgctaa

SEQ ID NO: 21893 - DNA, 80 bp, synthetic construct
  misc_feature 1..80: note = Synthetic: >SBB_943_6-cand-770-849
  source 1..80: mol_type = other DNA
tgttctgttgaacatttgtcagcagatgcagactgatattcatcaacatgggttccacatttcaggcaattctttttgcc

SEQ ID NO: 21894 - DNA, 80 bp, synthetic construct
  misc_feature 1..80: note = Synthetic: >SBB_943_6-cand-850-929
  source 1..80: mol_type = other DNA
gtgcagttgcatggtgtttagctagactgtctgaggagttcgacgtccctgatgagacgcctttcatctacattttgtgt

SEQ ID NO: 21895 - DNA, 80 bp, synthetic construct
  misc_feature 1..80: note = Synthetic: >KU886219_2-cand-140-219
  source 1..80: mol_type = other DNA
tcacaagttgaagaagatgtagaaatgtcggattttgctgatcttgaatctgtgattcaggattatgaaaatgtctgttt

SEQ ID NO: 21896 - DNA, 80 bp, synthetic construct
  misc_feature 1..80: note = Synthetic: >MN514967_2-cand-0-79
  source 1..80: mol_type = other DNA
ttctttaagtgcagctatacattatttgaattctaaaattgttgatttggctcaacattttagtgattttggaacaagtt

SEQ ID NO: 21897 - DNA, 80 bp, synthetic construct
  misc_feature 1..80: note = Synthetic: >MN306036_3-cand-150-229
  source 1..80: mol_type = other DNA
aaacattcctcgttatgctagtgctgttgcacaagcatttcagagtgttgctaaagttgtactggactctttaagagtta

SEQ ID NO: 21898 - DNA, 80 bp, synthetic construct
  misc_feature 1..80: note = Synthetic: >KF923912_2-cand-200-279
  source 1..80: mol_type = other DNA
aattatgaaaatgtttgttttgagttttatactacagagccagaatttgttaaagttttgggtctgtatgtgcctaaagc

SEQ ID NO: 21899 - DNA, 80 bp, synthetic construct
  misc_feature 1..80: note = Synthetic: >MH687935_4-cand-520-599
  source 1..80: mol_type = other DNA
ttttcgactaaattcaaaattcagttgctctcaaactcttttgatgatgaagtgaagggtgccatcatgcagggcatttt

SEQ ID NO: 21900 - DNA, 80 bp, synthetic construct
  misc_feature 1..80: note = Synthetic: >MH687940_3-cand-90-169
  source 1..80: mol_type = other DNA
atttaaatggtgtaaaagtggcagttgctaaaagatttaaaaagtttggtgtgatgttgcaacagttgtataatacgttt

SEQ ID NO: 21901 - DNA, 80 bp, synthetic construct
  misc_feature 1..80: note = Synthetic: >MK329221_3-cand-530-609
  source 1..80: mol_type = other DNA
aacatagcccaggcagtcgtatatttacttctgaaacagtacctactgtcactgctaattttttaaataatgtggtttta

SEQ ID NO: 21902 - DNA, 80 bp, synthetic construct
  misc_feature 1..80: note = Synthetic: >KU886219_1-cand-110-189
  source 1..80: mol_type = other DNA
agacttttactactagcactgctcttgcatttgcatgggttttatttcatgttttgcatggtgcttatatagtagtagag

SEQ ID NO: 21903 - DNA, 80 bp, synthetic construct
  misc_feature 1..80: note = Synthetic: >HQ012369_1-cand-900-979
  source 1..80: mol_type = other DNA
tggtggagttacaaaactatgactgtcccttctcgccacagcagtttaacaattatttgcagtttgaaactctgtgtttt

SEQ ID NO: 21904 - DNA, 80 bp, synthetic construct
  misc_feature 1..80: note = Synthetic: >MH043953_2-cand-60-139
  source 1..80: mol_type = other DNA
gtgttgccagtgaacaggaggagtcttctgaaatcttagaggacactttggatgatggtccatgtgtggagatatctgat

SEQ ID NO: 21905 - DNA, 80 bp, synthetic construct
  misc_feature 1..80: note = Synthetic: >MN611521_3-cand-610-689
  source 1..80: mol_type = other DNA
tttcaataattggtttgttcttactaatagttctaccattgttgatggcaactttcaatcctcgcagccactcagggttt

SEQ ID NO: 21906 - DNA, 80 bp, synthetic construct
  misc_feature 1..80: note = Synthetic: >MK309398_3-cand-690-769
  source 1..80: mol_type = other DNA
aaattacttggattcttctggtctagctatattggatcagtcaggtgctgttgacactttcatgataaaaggtcaagcag

SEQ ID NO: 21907 - DNA, 80 bp, synthetic construct
  misc_feature 1..80: note = Synthetic: >KX900394_1-cand-120-199
  source 1..80: mol_type = other DNA
tagttaccgtattagttttgaaaatcaatggtctggcactgtcacacttggtgatatgcgtgcgacaacattagaagtct

SEQ ID NO: 21908 - DNA, 80 bp, synthetic construct
  misc_feature 1..80: note = Synthetic: >KU558922_2-cand-110-189
  source 1..80: mol_type = other DNA
agaagttcttttaattttgatcagaaggaattgcttgcctattacaacatgcttgttaattgttctaagtggcaggttgt

SEQ ID NO: 21909 - DNA, 80 bp, synthetic construct
  misc_feature 1..80: note = Synthetic: >KU558922_2-cand-0-79
  source 1..80: mol_type = other DNA
atgtgttttgtgatggagttaatgtcacgaaacataagtgtgatataaattataaaggtaaagtctttttccagtttgat

SEQ ID NO: 21910 - DNA, 80 bp, synthetic construct
  misc_feature 1..80: note = Synthetic: >KU215424_2-cand-300-379
  source 1..80: mol_type = other DNA
aataatactggtggttcaaactacacccatttgcagttgagtgagtgccatagtgactactgtgccggttatgctaagaa

SEQ ID NO: 21911 - DNA, 80 bp, synthetic construct
  misc_feature 1..80: note = Synthetic: >KX900402_1-cand-50-129
  source 1..80: mol_type = other DNA
tttgacttgcaattggggtagtgagtgcaggttaaaccataagttccctatatgtccttctaattctgaggcaaattgtg

SEQ ID NO: 21912 - DNA, 80 bp, synthetic construct
  misc_feature 1..80: note = Synthetic: >FJ938057_2-cand-0-79
  source 1..80: mol_type = other DNA
tatactgccaccaaccgtacgagagtttgcatttggcagagatggctccatttttgttaatggctataaatattttagtt

SEQ ID NO: 21913 - DNA, 80 bp, synthetic construct
  misc_feature 1..80: note = Synthetic: >MN611521_3-cand-410-489
  source 1..80: mol_type = other DNA
gctgagaggtgggatgtagttaaggtttgggctacaaaccgttgtcccagttcctttcagattgtttacgaacctagtgt

SEQ ID NO: 21914 - DNA, 80 bp, synthetic construct
  misc_feature 1..80: note = Synthetic: >GQ153544_1-cand-160-239
  source 1..80: mol_type = other DNA
cccacgggtttctcagtcttgaaaccaattttaaaattgccctttggaattaatatcacttcttatagagtagttatggc

SEQ ID NO: 21915 - DNA, 80 bp, synthetic construct
  misc_feature 1..80: note = Synthetic: >FJ938060_2-cand-540-619
  source 1..80: mol_type = other DNA
aacaacactgctgtggtgcattttaataatgatgtcttctgccctaacgtcacagcggacgttttgaggtttaatttgaa

SEQ ID NO: 21916 - DNA, 80 bp, synthetic construct
  misc_feature 1..80: note = Synthetic: >MH687940_3-cand-630-709
  source 1..80: mol_type = other DNA
ttaaagtctgtgaaaaagccattggtactagacttaaagtcacaggtggttgggatcagttgttagaaactgttgacatt

SEQ ID NO: 21917 - DNA, 80 bp, synthetic construct
  misc_feature 1..80: note = Synthetic: >FJ938061_1-cand-300-379
  source 1..80: mol_type = other DNA
atgcactgattataacatatatggatttcagggcacaggcattattagaaatacaacctcacgcttagtggcaggccttt

SEQ ID NO: 21918 - DNA, 80 bp, synthetic construct
  misc_feature 1..80: note = Synthetic: >MH687936_4-cand-420-499
  source 1..80: mol_type = other DNA
gttacagtaacgtgtttattaagcatgttactgacattacggtgcccggaacaaagttgggttgggggatatggcgtatt

SEQ ID NO: 21919 - DNA, 80 bp, synthetic construct
  misc_feature 1..80: note = Synthetic: >MK329221_3-cand-170-249
  source 1..80: mol_type = other DNA
cttcacctggtgtttcaaattttgtatattaccaacagactagtgctgttcctggttataataattttaatttttctttt

SEQ ID NO: 21920 - DNA, 80 bp, synthetic construct
  misc_feature 1..80: note = Synthetic: >MK217372_2-cand-270-349
  source 1..80: mol_type = other DNA
taataattttaatttttcttttttgcgttcttttacttatttaagtagtgattatatgaggggttcttttcacccaagtt

SEQ ID NO: 21921 - DNA, 80 bp, synthetic construct
  misc_feature 1..80: note = Synthetic: >KF668605_2-cand-30-109
  source 1..80: mol_type = other DNA
taagcctactcgccgttcttttgtagaagatttactattcacaaaggtggagtcactaggattacctggtgatactgctt

SEQ ID NO: 21922 - DNA, 80 bp, synthetic construct
  misc_feature 1..80: note = Synthetic: >MK217375_2-cand-860-939
  source 1..80: mol_type = other DNA
atgttgtttcaggcggcaatatagtcggccttctaacatctataaatagtagtggttctcagttattagaggaccagtac

SEQ ID NO: 21923 - DNA, 80 bp, synthetic construct
  misc_feature 1..80: note = Synthetic: >MH687937_1-cand-190-269
  source 1..80: mol_type = other DNA
actatcactggtatgcccaaggcggctgaggggatcaatgatatctcttttgtgcacctcaatgtgtgcacttcctacac

SEQ ID NO: 21924 - DNA, 80 bp, synthetic construct
  misc_feature 1..80: note = Synthetic: >MH687962_2-cand-40-119
  source 1..80: mol_type = other DNA
aggtgttcgtagcgttaaggattttatcttgagtcttaaagtaaaccttgatcttaatggtgtaaaagtggcagttgcta

SEQ ID NO: 21925 - DNA, 80 bp, synthetic construct
  misc_feature 1..80: note = Synthetic: >MH687935_4-cand-970-1049
  source 1..80: mol_type = other DNA
aaatctaaagttaaaggaccaagacaggctggtttgaagcagttgcaatttgccactgtcgttcttggagacacacagaa

SEQ ID NO: 21926 - DNA, 80 bp, synthetic construct
  misc_feature 1..80: note = Synthetic: >MK492263_10-cand-990-1069
  source 1..80: mol_type = other DNA
ttcgtaccaaaagtgtatagactctcagtggggtggtagtgtacgtgatttgatttgtacacaaaattttaatggcattt

SEQ ID NO: 21927 - DNA, 80 bp, synthetic construct
  misc_feature 1..80: note = Synthetic: >MH687952_6-cand-180-259
  source 1..80: mol_type = other DNA
ctttcatgctcttatcacatgtcaatgtggtagaagcgaatggactgtgggtgattggaagagttataactcactttgtt

SEQ ID NO: 21928 - DNA, 80 bp, synthetic construct
  misc_feature 1..80: note = Synthetic: >MH687949_5-cand-1160-1239
  source 1..80: mol_type = other DNA
ttggagaccaggcgttcttttgcagtgacggtgtctacagatttatgtctgattttgatgctgtgttacttgggcctgtt

SEQ ID NO: 21929 - DNA, 80 bp, synthetic construct
  misc_feature 1..80: note = Synthetic: >MH687952_6-cand-270-349
  source 1..80: mol_type = other DNA
gtgtaagcctattacaattgttgccccaaaggctgttccaggtgctgtgcttgtcaccaaagctgacgttggttctggtt

SEQ ID NO: 21930 - DNA, 80 bp, synthetic construct
  misc_feature 1..80: note = Synthetic: >KU215422_1-cand-120-199
  source 1..80: mol_type = other DNA
aactctgtgttttgatgtgaacccagctgttgcaggttgtaagtgggcactagttcatgatgtcaagtggcgtacgcagt

SEQ ID NO: 21931 - DNA, 80 bp, synthetic construct
  misc_feature 1..80: note = Synthetic: >MH687949_3-cand-680-759
  source 1..80: mol_type = other DNA
aagccatgtcctagttgacaaattgtttgaagtgaaacctgtgcaggtggttgtgacaaaggatcagcgtacctttgaca

SEQ ID NO: 21932 - DNA, 80 bp, synthetic construct
  misc_feature 1..80: note = Synthetic: >MH687947_4-cand-960-1039
  source 1..80: mol_type = other DNA
ctagtacgtgtgacactttagctgtggctggtagagcttttgctagagttggtgacatggttattatgcctaagtcgctt

SEQ ID NO: 21933 - DNA, 80 bp, synthetic construct
  misc_feature 1..80: note = Synthetic: >MH687935_4-cand-0-79
  source 1..80: mol_type = other DNA
tcacactcttgctgatggtactgtcatgaagacagctaaacaccctaaaattaacaagagtgttgtacttacacctcctt

SEQ ID NO: 21934 - DNA, 80 bp, synthetic construct
  misc_feature 1..80: note = Synthetic: >MH687936_4-cand-180-259
  source 1..80: mol_type = other DNA
aagttggctcaccattcatgggtaatggtgaaactttcgtagaaatggtcaaggatccagttttctttcatgctcttatc

SEQ ID NO: 21935 - DNA, 80 bp, synthetic construct
  misc_feature 1..80: note = Synthetic: >MH687949_3-cand-450-529
  source 1..80: mol_type = other DNA
agaaaggttaacactaatgtccctgctggtaactgcgttacacttaagtgtgacgggtttacttcttttacatttgttgt

SEQ ID NO: 21936 - DNA, 80 bp, synthetic construct
  misc_feature 1..80: note = Synthetic: >MH687949_3-cand-540-619
  source 1..80: mol_type = other DNA
gctgatgaaaagggctatgaaaagaactttaatagagccatcactaagttttttaaacttaaaggtacattattagttgt

SEQ ID NO: 21937 - DNA, 80 bp, synthetic construct
  misc_feature 1..80: note = Synthetic: >MH687935_3-cand-90-169
  source 1..80: mol_type = other DNA
gttccaattgaagagtctttggctgcgttgcttgcttgtgctggagacagtgtctgccggtgcttctgttatagtgatgt

SEQ ID NO: 21938 - DNA, 80 bp, synthetic construct
  misc_feature 1..80: note = Synthetic: >MH687949_3-cand-180-259
  source 1..80: mol_type = other DNA
gctattgaaaagtttgtttccaatgcagttcaggttcctgttactgttgtagatgacaaacccaaagaagttgttaaagt

SEQ ID NO: 21939 - DNA, 80 bp, synthetic construct
  misc_feature 1..80: note = Synthetic: >MH687962_1-cand-230-309
  source 1..80: mol_type = other DNA
agatgacaaacccaaagaagctgttaaaggcaagcaatcagttcagccttttagagttgaaggtgcctcaaagttttatg

SEQ ID NO: 21940 - DNA, 80 bp, synthetic construct
  misc_feature 1..80: note = Synthetic: >MH687962_3-cand-1140-1219
  source 1..80: mol_type = other DNA
catctagagtggaattctctacagtcaaccttaaaatggtagacgaagacgtgcctttgaaccctgatgggtacacagtg

SEQ ID NO: 21941 - DNA, 80 bp, synthetic construct
  misc_feature 1..80: note = Synthetic: >MH687950_4-cand-590-669
  source 1..80: mol_type = other DNA
tcttaaacttaaaggtactttattagttgttgttgatgatgtcaacattttttcgaaaatctcacattttgctgttttgg

SEQ ID NO: 21942 - DNA, 80 bp, synthetic construct
  misc_feature 1..80: note = Synthetic: >MH687952_5-cand-0-79
  source 1..80: mol_type = other DNA
gcaccagagctcttgactaaggcttacacttttatttttaaacagaagggcgttccattgacgccactgcttagtgttgg

SEQ ID NO: 21943 - DNA, 80 bp, synthetic construct
  misc_feature 1..80: note = Synthetic: >MK574042_3-cand-0-79
  source 1..80: mol_type = other DNA
ttgtcagtataatacaggcaatttttctgacggtttgtacccttttagcgtaagcagtgtagttaatgaaacttttatag

SEQ ID NO: 21944 - DNA, 80 bp, synthetic construct
  misc_feature 1..80: note = Synthetic: >FJ938061_2-cand-720-799
  source 1..80: mol_type = other DNA
atattgccaccaactgtgcgagagtttgcttttggcagggatggttccgtttttgttaatggttacaaatattttagttt

SEQ ID NO: 21945 - DNA, 80 bp, synthetic construct
  misc_feature 1..80: note = Synthetic: >FJ938061_2-cand-810-889
  source 1..80: mol_type = other DNA
aagagtgtcaacttctctattagctcagttgagcagtatggcttttggaccatagcctacaccaactatacagatgtaat

SEQ ID NO: 21946 - DNA, 80 bp, synthetic construct
  misc_feature 1..80: note = Synthetic: >MH687939_1-cand-80-159
  source 1..80: mol_type = other DNA
gtaatggcattacacacatacaggtttgttaaagcacctagtaggtttacctcttacattgtggcacttgtcactgttgt

SEQ ID NO: 21947 - DNA, 80 bp, synthetic construct
  misc_feature 1..80: note = Synthetic: >KP143510_2-cand-550-629
  source 1..80: mol_type = other DNA
acacaagcaagaagagcacgcaggtcaacaggttcacagaccgtgcaaacttatactatgccacaattctattacataac

SEQ ID NO: 21948 - DNA, 80 bp, synthetic construct
  misc_feature 1..80: note = Synthetic: >KU215424_2-cand-480-559
  source 1..80: mol_type = other DNA
agtaggcagcctgtctttgtacaatgtcttaggcctgtgccaacgtggtctaacaacactgctgtggtgcattttaataa

SEQ ID NO: 21949 - DNA, 80 bp, synthetic construct
  misc_feature 1..80: note = Synthetic: >KU215426_2-cand-360-439
  source 1..80: mol_type = other DNA
agtgactactgtgccggttatgctaagaacgtcttcgtgccagtagacggtaaaataccagaaagcttttcatttagtaa

SEQ ID NO: 21950 - DNA, 80 bp, synthetic construct
  misc_feature 1..80: note = Synthetic: >KU215424_2-cand-0-79
  source 1..80: mol_type = other DNA
gctgtaaaaatttgccattggaaaccaggtaatataagttcctaccaccagtttagtcttaattttggagatggaggcca

SEQ ID NO: 21951 - DNA, 80 bp, synthetic construct
  misc_feature 1..80: note = Synthetic: >MH687958_1-cand-0-79
  source 1..80: mol_type = other DNA
tgaacagtttgagacagactgcccattcacacatagcacattaaataattacttgtcgtttggtactctgtgtttttcca

SEQ ID NO: 21952 - DNA, 80 bp, synthetic construct
  misc_feature 1..80: note = Synthetic: >FJ938060_2-cand-760-839
  source 1..80: mol_type = other DNA
cccaaattccctttggaaaaacgatgcactcctacttttgttttgccaacttttcacaatctattgtgagcagacaattt

SEQ ID NO: 21953 - DNA, 80 bp, synthetic construct
  misc_feature 1..80: note = Synthetic: >KY419109_1-cand-40-119
  source 1..80: mol_type = other DNA
cttttataatgtttgttggtcgtgttatttctgttgtctcattgtggtacatgggctccaacttagaagaagaaattctt

SEQ ID NO: 21954 - DNA, 80 bp, synthetic construct
  misc_feature 1..80: note = Synthetic: >KU361188_3-cand-90-169
  source 1..80: mol_type = other DNA
gaatacagaaactactatgcttacattaaataatttcactttttttaatcagagtggggctcaacctaatcaaaaggaac

SEQ ID NO: 21955 - DNA, 80 bp, synthetic construct
  misc_feature 1..80: note = Synthetic: >KY566211_3-cand-120-199
  source 1..80: mol_type = other DNA
aactttgtgttttgatgtgagcccagctgtggcaggttgtaagtggtcattagttcatgacaacaagtggcgtacacagt

SEQ ID NO: 21956 - DNA, 80 bp, synthetic construct
  misc_feature 1..80: note = Synthetic: >KY566209_2-cand-480-559
  source 1..80: mol_type = other DNA
ttatggtttccaatggactgacacctatgttgacatctatctcagcggcactgtcactaaagtgtggattgaaaacgatt

SEQ ID NO: 21957 - DNA, 80 bp, synthetic construct
  misc_feature 1..80: note = Synthetic: >FJ938056_1-cand-40-119
  source 1..80: mol_type = other DNA
tgacttttttgaacactacatatacgacatttcgggatattgtgattgattatattgacatcaaccagactatttctgat

SEQ ID NO: 21958 - DNA, 80 bp, synthetic construct
  misc_feature 1..80: note = Synthetic: >KJ473813_1-cand-500-579
  source 1..80: mol_type = other DNA
aaaacccattcttaaattaccgtttggaattaatattacttcttttagagtggttatggcaatgttcagtaaaaccactt

SEQ ID NO: 21959 - DNA, 80 bp, synthetic construct
  misc_feature 1..80: note = Synthetic: >MH687937_2-cand-830-909
  source 1..80: mol_type = other DNA
aatgccattactgttactgtcagtgctgctgctagtgatatatctggcttttggaccattgctgctacaaattttgctga

SEQ ID NO: 21960 - DNA, 80 bp, synthetic construct
  misc_feature 1..80: note = Synthetic: >MH687943_1-cand-90-169
  source 1..80: mol_type = other DNA
tggccagtgcctgcaagtttaatttttatgtgtattcagatgttcatactgggcagagtcatcttttgggtgtcctctat

SEQ ID NO: 21961 - DNA, 80 bp, synthetic construct
  misc_feature 1..80: note = Synthetic: >FJ938060_2-cand-670-749
  source 1..80: mol_type = other DNA
atttcacatttgatgacaatacaactgcgtctatatcttgttttagcagtgctaatgttactgaccaggagcctgcagcc

SEQ ID NO: 21962 - DNA, 80 bp, synthetic construct
  misc_feature 1..80: note = Synthetic: >KP143508_3-cand-570-649
  source 1..80: mol_type = other DNA
gagtgttaatttctctattagttcggttgaaaattttggtttttggactatagcttacaccaattacaccgatgtaatgg

SEQ ID NO: 21963 - DNA, 80 bp, synthetic construct
  misc_feature 1..80: note = Synthetic: >KP143510_3-cand-300-379
  source 1..80: mol_type = other DNA
gttgtacttcacatttgaagacaatactactgcaggcgtagcttgctatagtagcgctaatattacagattataaaccaa

SEQ ID NO: 21964 - DNA, 80 bp, synthetic construct
  misc_feature 1..80: note = Synthetic: >GCS_264a_7-cand-210-289
  source 1..80: mol_type = other DNA
gccagagtcgttgattaaagttttgaccaccgttgatggcataaattttaatacagtcttagtttctcgtgaacagagtt

SEQ ID NO: 21965 - DNA, 80 bp, synthetic construct
  misc_feature 1..80: note = Synthetic: >KJ473813_1-cand-1510-1589
  source 1..80: mol_type = other DNA
ttgacatttcaccgtgctcttttggtggtgtgagtgtcataacaccaggaactaacacttcatctgcagtggctgttctt

SEQ ID NO: 21966 - DNA, 80 bp, synthetic construct
  misc_feature 1..80: note = Synthetic: >GCS_265a_7-cand-200-279
  source 1..80: mol_type = other DNA
aagccaggtgatcatgttttgttgaattctcatggcttggctaaggatgggattttacatgtagtaggacctgacaagcg

SEQ ID NO: 21967 - DNA, 80 bp, synthetic construct
  misc_feature 1..80: note = Synthetic: >DQ071615_1-cand-480-559
  source 1..80: mol_type = other DNA
tggcttttcagttttgaggccaattctcaaactgccctttggaattaacattacatcttatagagttgttatggctatgt

SEQ ID NO: 21968 - DNA, 80 bp, synthetic construct
  misc_feature 1..80: note = Synthetic: >HQ012372_2-cand-90-169
  source 1..80: mol_type = other DNA
agataaatccactttagtgcaaggacgtgttcttagtaggcaaccagtttttgtacaatgcctcaggcctgtgccatcgt

SEQ ID NO: 21969 - DNA, 80 bp, synthetic construct
  misc_feature 1..80: note = Synthetic: >KX900402_1-cand-0-79
  source 1..80: mol_type = other DNA
attatatgcatttgtaagggctcaccacctactaccaccacagaatctagtttgacttgcaattggggtagtgagtgcag

SEQ ID NO: 21970 - DNA, 80 bp, synthetic construct
  misc_feature 1..80: note = Synthetic: >HQ392472_2-cand-710-789
  source 1..80: mol_type = other DNA
ctattactctgtcttacaaagacggtgctaagattacaaccatgccgaaggcgcagctgggttttcaagatatctccaat

SEQ ID NO: 21971 - DNA, 80 bp, synthetic construct
  misc_feature 1..80: note = Synthetic: >GCS_264b_4-cand-0-79
  source 1..80: mol_type = other DNA
tggattttatctctcttcagatcaaaatgcgtcattggctgaggattttaacaaggctattaatgcaactaggcaggggc

SEQ ID NO: 21972 - DNA, 80 bp, synthetic construct
  misc_feature 1..80: note = Synthetic: >MH687940_3-cand-990-1069
  source 1..80: mol_type = other DNA
cacttgcttttatgaaaccacaacctatacaacgaccggttactaataaacagcacgatttgttttcgtttgagtttttt

SEQ ID NO: 21973 - DNA, 80 bp, synthetic construct
  misc_feature 1..80: note = Synthetic: >DQ412042_1-cand-1130-1209
  source 1..80: mol_type = other DNA
cactgctaagcaagacgtcggtagctatttttataggtctcatcgctctagcaaattaaaaccctttgaaagagaccttt

SEQ ID NO: 21974 - DNA, 80 bp, synthetic construct
  misc_feature 1..80: note = Synthetic: >KJ473812_1-cand-450-529
  source 1..80: mol_type = other DNA
cagacttataccccagttaacctccttagaggtttgccatcaggtctttcagttttaaaacccattcttaaattaccgtt

SEQ ID NO: 21975 - DNA, 80 bp, synthetic construct
  misc_feature 1..80: note = Synthetic: >GCS_264a_9-cand-450-529
  source 1..80: mol_type = other DNA
agtagtcagagtcgaagcatcatttaacaccaccgcctatttatgttttaggcttaatggggtgttggatcaagatgttg

SEQ ID NO: 21976 - DNA, 80 bp, synthetic construct
  misc_feature 1..80: note = Synthetic: >MH687950_4-cand-360-439
  source 1..80: mol_type = other DNA
ttcacgtctagtgactttgagttgtctgattttgtcaaaagttgtgatgtctatttggataaacaacttactaaggccat

SEQ ID NO: 21977 - DNA, 80 bp, synthetic construct
  misc_feature 1..80: note = Synthetic: >FJ938059_4-cand-30-109
  source 1..80: mol_type = other DNA
ccccaacgttacggcggaagttttgaggttcaacttgaactttagtgacagtgatgtttacacagagtcaagcatagatg

SEQ ID NO: 21978 - DNA, 80 bp, synthetic construct
  misc_feature 1..80: note = Synthetic: >KJ473811_1-cand-230-309
  source 1..80: mol_type = other DNA
ttaaaggtactggtgtgttgactgactcgtccaaaacgtttcagtcttttcagcagtttggtcgggacgcatctgatttt

SEQ ID NO: 21979 - DNA, 80 bp, synthetic construct
  misc_feature 1..80: note = Synthetic: >GCS_265b_11-cand-1390-1469
  source 1..80: mol_type = other DNA
aaaatgtgcacattgtaccaaaggccataactgtaaattttacttatgacatttgtgaaggacttaatgaagtgcttggt

SEQ ID NO: 21980 - DNA, 80 bp, synthetic construct
  misc_feature 1..80: note = Synthetic: >KJ473812_1-cand-630-709
  source 1..80: mol_type = other DNA
aaacagtccacttttatgctcagctttaatcagaatggaactattgtagatgctgtggattgttctcaagatccacttgc

SEQ ID NO: 21981 - DNA, 80 bp, synthetic construct
  misc_feature 1..80: note = Synthetic: >KP143508_3-cand-450-529
  source 1..80: mol_type = other DNA
aagctctcatgttacacaatttttgggtatattgccaccaattgtgcgagagtttgcgtttggcaaagacggttccattt

SEQ ID NO: 21982 - DNA, 80 bp, synthetic construct
  misc_feature 1..80: note = Synthetic: >DQ412042_1-cand-1220-1299
  source 1..80: mol_type = other DNA
aaatggtgtccgtacactcagtacgtatgattttaaccaaaatgtacctcttgagtaccaagccactagagttgttgttc

SEQ ID NO: 21983 - DNA, 80 bp, synthetic construct
  misc_feature 1..80: note = Synthetic: >GQ427176_1-cand-490-569
  source 1..80: mol_type = other DNA
cagctggcaacgtagttgcttttgaaccctgcacaggagacactactattaataagttacgttgcgcttatcagcaattt

SEQ ID NO: 21984 - DNA, 80 bp, synthetic construct
  misc_feature 1..80: note = Synthetic: >GCS_264a_9-cand-650-729
  source 1..80: mol_type = other DNA
tagctaaagctttcggtgaaggcattaataatttgacaatcccagtccaatgtcagggaggaggtttgttcaaacaattt

SEQ ID NO: 21985 - DNA, 80 bp, synthetic construct
  misc_feature 1..80: note = Synthetic: >KY073746_6-cand-500-579
  source 1..80: mol_type = other DNA
ttgatgttaaggacagtatagtccctgttaagtgtgcagctgtgtacttgggttctacagaggccggccattacaaggtt

SEQ ID NO: 21986 - DNA, 80 bp, synthetic construct
  misc_feature 1..80: note = Synthetic: >KT444582_1-cand-130-209
  source 1..80: mol_type = other DNA
aagcatgacggtgctatagtagataattctcaacctgtctttgtggatgctaggaattatgtaccaactactgcaccatt

SEQ ID NO: 21987 - DNA, 80 bp, synthetic construct
  misc_feature 1..80: note = Synthetic: >GCS_265b_11-cand-340-419
  source 1..80: mol_type = other DNA
ttaagattgatgaagacactcttgaaaaaccatcatgtgtgtcttttgttgctaatttacagtgtgatgataaacctatt

SEQ ID NO: 21988 - DNA, 80 bp, synthetic construct
  misc_feature 1..80: note = Synthetic: >HQ392472_2-cand-860-939
  source 1..80: mol_type = other DNA
aatcacgtttagtagctggcctttactacacatctattagtggtgaccttctcgcttttaaaaatagtactactggggaa

SEQ ID NO: 21989 - DNA, 80 bp, synthetic construct
  misc_feature 1..80: note = Synthetic: >GQ427173_1-cand-410-489
  source 1..80: mol_type = other DNA
acaaaccttaacaatttggttagcacagtgtgttggcacaatgaaggttgttattttacgtaatagtaatgctctagttc

SEQ ID NO: 21990 - DNA, 80 bp, synthetic construct
  misc_feature 1..80: note = Synthetic: >MH687960_2-cand-30-109
  source 1..80: mol_type = other DNA
acccaccagttaaaggatttttctggagtttctttagtggcgttactgcaactagctttggtgttagttgtcataattgt

SEQ ID NO: 21991 - DNA, 80 bp, synthetic construct
  misc_feature 1..80: note = Synthetic: >KJ473812_1-cand-990-1069
  source 1..80: mol_type = other DNA
tgttttacaagtgtgtatgcagacacatttttgataagattttcagaagtcagacaagtggcacctggtcagactggtgt

SEQ ID NO: 21992 - DNA, 80 bp, synthetic construct
  misc_feature 1..80: note = Synthetic: >JF792616_1-cand-130-209
  source 1..80: mol_type = other DNA
acaggtaaacctaagtctgctaattgcccaacaggtacctcgaatcgtgagtgtaatgttcaggcttcaggttttaagtc

SEQ ID NO: 21993 - DNA, 80 bp, synthetic construct
  misc_feature 1..80: note = Synthetic: >MK211379_5-cand-0-79
  source 1..80: mol_type = other DNA
tgtcagctttaactttaacaaccaccaataagtttgatggtttacaagttgatcctttgcctgtagataaggaaagtggt

SEQ ID NO: 21994 - DNA, 80 bp, synthetic construct
  misc_feature 1..80: note = Synthetic: >GQ427173_1-cand-600-679
  source 1..80: mol_type = other DNA
atagatacttttgtacctgtgacatctaatattacatatttaccttacccagatttaaaagacaatactggtcaagaggt

SEQ ID NO: 21995 - DNA, 80 bp, synthetic construct
  misc_feature 1..80: note = Synthetic: >KP143508_3-cand-90-169
  source 1..80: mol_type = other DNA
agacaagtccacatcggtacagggtcgtgttcttagtaaacaaccagttttcgtacaatgtcttagagctgtgccatcat

SEQ ID NO: 21996 - DNA, 80 bp, synthetic construct
  misc_feature 1..80: note = Synthetic: >PRD_0038_5-cand-40-119
  source 1..80: mol_type = other DNA
caagaaatgcagttactggacggcttatacagtttgacaacccaaacataccatttaaagatggtttgtattttgccgct

SEQ ID NO: 21997 - DNA, 80 bp, synthetic construct
  misc_feature 1..80: note = Synthetic: >GCS_264a_9-cand-740-819
  source 1..80: mol_type = other DNA
atgtcttaattggctgcattaagtttacagcatggaattgggatgatactcttaaggagtttactttaagtaatacacct

SEQ ID NO: 21998 - DNA, 80 bp, synthetic construct
  misc_feature 1..80: note = Synthetic: >GCS_264b_8-cand-810-889
  source 1..80: mol_type = other DNA
agtctctgaattgacagctgatgtcgtgcgtagtgaaaacacggcgtttgacactacttataatttcacctccttgatgg

SEQ ID NO: 21999 - DNA, 80 bp, synthetic construct
  misc_feature 1..80: note = Synthetic: >HQ012368_1-cand-420-499
  source 1..80: mol_type = other DNA
tctatggctttcagtggactgacacctatgtagacatctacttaggtggtactatcactaaagtgtgggttgacaatgat

SEQ ID NO: 22000 - DNA, 80 bp, synthetic construct
  misc_feature 1..80: note = Synthetic: >MH687949_3-cand-360-439
  source 1..80: mol_type = other DNA
ttcacgtctagtgactttgaactgtctgattttttcaaaagttgtgacgtctatttggacaaacaacttactaaggccat

SEQ ID NO: 22001 - DNA, 80 bp, synthetic construct
  misc_feature 1..80: note = Synthetic: >KP143510_3-cand-390-469
  source 1..80: mol_type = other DNA
tagctcacagatcccttttggtaaaaccacgcattcatacttctgttttgccaatttctcaagctctcatgttacacaat

SEQ ID NO: 22002 - DNA, 80 bp, synthetic construct
  misc_feature 1..80: note = Synthetic: >MG757141_1-cand-20-99
  source 1..80: mol_type = other DNA
atttgttgattatacaggtgtgttaaagattgtcattgaattgatagttagttacgccctgtatacggcatggttttacc

SEQ ID NO: 22003 - DNA, 80 bp, synthetic construct
  misc_feature 1..80: note = Synthetic: >GCS_264a_9-cand-1010-1089
  source 1..80: mol_type = other DNA
tgttttaagagtttgtcaacctgtgtgccattcagttaagattcattgtcctgaatctaatcttcttgaatcagaaaaat

SEQ ID NO: 22004 - DNA, 80 bp, synthetic construct
  misc_feature 1..80: note = Synthetic: >KP143507_3-cand-180-259
  source 1..80: mol_type = other DNA
cagtgccgtggtgcattttagtaatgatgatttttgtcctaatgtcacggcagaggtgttaaggtttaatctgaatttta

SEQ ID NO: 22005 - DNA, 80 bp, synthetic construct
  misc_feature 1..80: note = Synthetic: >GCS_265b_5-cand-0-79
  source 1..80: mol_type = other DNA
ccacagttcttattttaataacacttttaacccaggagattttaatttcactggtgttaatatttcagaacaattagcca

SEQ ID NO: 22006 - DNA, 80 bp, synthetic construct
  misc_feature 1..80: note = Synthetic: >KP143511_1-cand-200-279
  source 1..80: mol_type = other DNA
cgtgtaggtttactcatagccatccacggcaaatcacaatatagcctactcatggttttgcaagacaatgtggaagagaa

SEQ ID NO: 22007 - DNA, 80 bp, synthetic construct
  misc_feature 1..80: note = Synthetic: >KY417151_1-cand-0-79
  source 1..80: mol_type = other DNA
tgcaaggtcttacgaagataaatactggcagcactatttttgataacaactttagtgtagtcaataataatttgtacttc

SEQ ID NO: 22008 - DNA, 80 bp, synthetic construct
  misc_feature 1..80: note = Synthetic: >KP143511_2-cand-310-389
  source 1..80: mol_type = other DNA
tataacatttacggatttcagggcactggtatcatcagaaacaccaccactaggatggttgcaggcctttactacacctc

SEQ ID NO: 22009 - DNA, 80 bp, synthetic construct
  misc_feature 1..80: note = Synthetic: >GQ427176_1-cand-0-79
  source 1..80: mol_type = other DNA
ggtgaagccctagatttttatagtccagatgtcatgcgaccgtcagacggtgcgtatatacaatccggttattacgaacc

SEQ ID NO: 22010 - DNA, 80 bp, synthetic construct
  misc_feature 1..80: note = Synthetic: >MF882923_1-cand-20-99
  source 1..80: mol_type = other DNA
ctacacctgttaatggcatgcattggtcatctaaaggagtgtgttcaatacattgcaattttagtacaattgttgttttt

SEQ ID NO: 22011 - DNA, 80 bp, synthetic construct
  misc_feature 1..80: note = Synthetic: >KJ473812_1-cand-360-439
  source 1..80: mol_type = other DNA
ttccaactagacacatcccctaagactggtaattttactgacttacgtgagtttgtctttaaaaatcgtgatgggttttt

SEQ ID NO: 22012 - DNA, 80 bp, synthetic construct
  misc_feature 1..80: note = Synthetic: >JX993988_1-cand-330-409
  source 1..80: mol_type = other DNA
atgacagagtcgagaaaagctttcagcttgacacggctcctaaaactggaaattttaaggacctacgtgagtatgtcttt

SEQ ID NO: 22013 - DNA, 80 bp, synthetic construct
  misc_feature 1..80: note = Synthetic: >DQ648856_2-cand-870-949
  source 1..80: mol_type = other DNA
tatgcctgggaaagaacaaagatttctgattgtgttgcagattacactgttttctacaactcaacttctttttcgacttt

SEQ ID NO: 22014 - DNA, 80 bp, synthetic construct
  misc_feature 1..80: note = Synthetic: >KJ473812_1-cand-1080-1159
  source 1..80: mol_type = other DNA
tacaattataaactacctgacgactttacaggctgtgttatagcttggaacactgctaagcaagacgtcggtagctattt

SEQ ID NO: 22015 - DNA, 80 bp, synthetic construct
  misc_feature 1..80: note = Synthetic: >MK211379_10-cand-870-949
  source 1..80: mol_type = other DNA
ataccatttctctttcaggagactggtttgtggaaaaactttttaaattcttctactcattcaggcatacgaattaggtt

SEQ ID NO: 22016 - DNA, 80 bp, synthetic construct
  misc_feature 1..80: note = Synthetic: >MK211379_6-cand-160-239
  source 1..80: mol_type = other DNA
tcctattcctgaagatgaatttcatccggcattgttgggacctgtttattacactcaacgtatctattggtacgctgctt

SEQ ID NO: 22017 - DNA, 80 bp, synthetic construct
  misc_feature 1..80: note = Synthetic: >DQ412042_1-cand-780-859
  source 1..80: mol_type = other DNA
tcaccagttactgaggttgttagatttccaaatattacaaatctctgtccttttgacaaggtttttaatgccacacgctt

SEQ ID NO: 22018 - DNA, 80 bp, synthetic construct
  misc_feature 1..80: note = Synthetic: >GCS_264a_6-cand-690-769
  source 1..80: mol_type = other DNA
gagagctattagtagcttatagtgatgctggtatacctactaaagttgcagattgttcattaaatgctggccaagagctt

SEQ ID NO: 22019 - DNA, 80 bp, synthetic construct
  misc_feature 1..80: note = Synthetic: >GCS_264a_9-cand-270-349
  source 1..80: mol_type = other DNA
agagatcctaaggtttttgcagaaatgcctttttccttaacgaaccatgattaagcttttattcttagctataatccctt

SEQ ID NO: 22020 - DNA, 80 bp, synthetic construct
  misc_feature 1..80: note = Synthetic: >KJ473813_1-cand-680-759
  source 1..80: mol_type = other DNA
ggattgttctcaagatccacttgcagagttaaagtgtactacaaaaagttttaatgtctccaaaggcatttatcaaactt

SEQ ID NO: 22021 - DNA, 80 bp, synthetic construct
  misc_feature 1..80: note = Synthetic: >MK492263_10-cand-540-619
  source 1..80: mol_type = other DNA
aagtttggttaactacgaccctacttacacatcactgactaaagtgctcacacctgtttattgggttagcataccaacta

SEQ ID NO: 22022 - DNA, 80 bp, synthetic construct
  misc_feature 1..80: note = Synthetic: >KJ473813_1-cand-90-169
  source 1..80: mol_type = other DNA
aatcccatattgaaatttggtgacggtgtttacttcgcagccaccgaaaagtctaatgtaataagaggctgggtgtttgg

SEQ ID NO: 22023 - DNA, 80 bp, synthetic construct
  misc_feature 1..80: note = Synthetic: >HQ012371_3-cand-280-359
  source 1..80: mol_type = other DNA
gctagcatgcttgttaaaaaggatctacctaagacatttgtaaccatgccacagttttataactggatgaatgtcacatt

SEQ ID NO: 22024 - DNA, 80 bp, synthetic construct
  misc_feature 1..80: note = Synthetic: >MH687943_2-cand-750-829
  source 1..80: mol_type = other DNA
acaatgatactcctgatgccttccgatttaaccttaattccactgagcaatcacattatataaatggtatcactttgttg

SEQ ID NO: 22025 - DNA, 80 bp, synthetic construct
  misc_feature 1..80: note = Synthetic: >HQ012369_1-cand-120-199
  source 1..80: mol_type = other DNA
acactgatgtctatacagactcaattaaagacgatcagtttcacttcacttttcaagataatacaactgcatccatagct

SEQ ID NO: 22026 - DNA, 80 bp, synthetic construct
  misc_feature 1..80: note = Synthetic: >FJ938055_5-cand-230-309
  source 1..80: mol_type = other DNA
acatggcaaatctcactacagtttactaatggttttacaagacaacgttgaggagaatcagcctcatgttgccgttaaaa

SEQ ID NO: 22027 - DNA, 80 bp, synthetic construct
  misc_feature 1..80: note = Synthetic: >GCS_264b_8-cand-450-529
  source 1..80: mol_type = other DNA
taacatgcccattggtaacagtctttgtttagttaatgccacgagcacacaagtgcgtgctagtgatggtgattctaagt

SEQ ID NO: 22028 - DNA, 80 bp, synthetic construct
  misc_feature 1..80: note = Synthetic: >GCS_019_7-cand-80-159
  source 1..80: mol_type = other DNA
ggtcattgcccacacaggtgtaaagtacgttctcgtgttaagtctgtcaaaggtcgtgctgtggttaccaacgtagaagt

SEQ ID NO: 22029 - DNA, 80 bp, synthetic construct
  misc_feature 1..80: note = Synthetic: >KJ473812_1-cand-180-259
  source 1..80: mol_type = other DNA
acttttgacaacaccactcagtctgctattatagtcaataattccacacacattattatacgtgtgtgctattttaacct

SEQ ID NO: 22030 - DNA, 80 bp, synthetic construct
  misc_feature 1..80: note = Synthetic: >MK211379_11-cand-320-399
  source 1..80: mol_type = other DNA
cagttagcatacctgcttctgcctattggctgcgtactgtgtcagacaatcaaacagctggtgtgtttgacacaccatct

SEQ ID NO: 22031 - DNA, 80 bp, synthetic construct
  misc_feature 1..80: note = Synthetic: >KY419104_3-cand-0-79
  source 1..80: mol_type = other DNA
ttttgctgcagttacaaacgctactaagtgtacttgctggtgtcaaccagatccttccacatataaaggtgtaaatgcct

SEQ ID NO: 22032 - DNA, 80 bp, synthetic construct
  misc_feature 1..80: note = Synthetic: >GQ427175_1-cand-190-269
  source 1..80: mol_type = other DNA
attatgatgctgttggcataatgttttggtggggtttagctactaatgtgggtaaagtaacaccacccaatgatcccact

SEQ ID NO: 22033 - DNA, 80 bp, synthetic construct
  misc_feature 1..80: note = Synthetic: >KJ473813_1-cand-0-79
  source 1..80: mol_type = other DNA
ttacatctcacgcaggattatttcttaccattccattctaacctaacacagtacttttctcttaatattgagtcagatat

SEQ ID NO: 22034 - DNA, 80 bp, synthetic construct
  misc_feature 1..80: note = Synthetic: >MK492263_10-cand-180-259
  source 1..80: mol_type = other DNA
tagtattatagcagttaaagcacaggatactgtttacagtatttcaccatgtgtgtctgtgcctgtgtcagtgggatatg

SEQ ID NO: 22035 - DNA, 80 bp, synthetic construct
  misc_feature 1..80: note = Synthetic: >GCS_265a_8-cand-180-259
  source 1..80: mol_type = other DNA
ttggtgtagtttttggaactactttcgaacaagatcgtattgccatgattatgattgttcctggcaatttaggatcttgg

SEQ ID NO: 22036 - DNA, 80 bp, synthetic construct
  misc_feature 1..80: note = Synthetic: >GCS_264a_9-cand-1270-1349
  source 1..80: mol_type = other DNA
cccaacaattaggtggtttgactcagaaactctgtgtaagattcatcgaccccactcagtttgagccaggttacagatac

SEQ ID NO: 22037 - DNA, 80 bp, synthetic construct
  misc_feature 1..80: note = Synthetic: >MK211379_6-cand-110-189
  source 1..80: mol_type = other DNA
gaatcagttaaacaactttgtattgacaacaatgtcactgtgggtgtacatcctattcctgaagatgaatttcatccggc

SEQ ID NO: 22038 - DNA, 80 bp, synthetic construct
  misc_feature 1..80: note = Synthetic: >MK492263_10-cand-270-349
  source 1..80: mol_type = other DNA
tgaacaagctctattgtttaatggacttgaatgcaatcaacgtgctgtggcagttagcatacctgcttctgcttattggc

SEQ ID NO: 22039 - DNA, 80 bp, synthetic construct
  misc_feature 1..80: note = Synthetic: >GCS_264b_8-cand-90-169
  source 1..80: mol_type = other DNA
taacttttatggttattctggtaatggtgttttgacaaagtccaatctcaccataccagataataagttgtttgttgcta

SEQ ID NO: 22040 - DNA, 80 bp, synthetic construct
  misc_feature 1..80: note = Synthetic: >GCS_264b_4-cand-120-199
  source 1..80: mol_type = other DNA
tgttgtggcagttacagatgataatgttacaacacatacttatggttccttgtacatgggtaaacctgtgctgtttgtga

SEQ ID NO: 22041 - DNA, 80 bp, synthetic construct
  misc_feature 1..80: note = Synthetic: >MG916903_11-cand-770-849
  source 1..80: mol_type = other DNA
ctgagtcttctaagtctaaacctaacataccactgcttctagtgtgtagttttgttgccatagctctatcatgttctttt

SEQ ID NO: 22042 - DNA, 80 bp, synthetic construct
  misc_feature 1..80: note = Synthetic: >KM454473_5-cand-330-409
  source 1..80: mol_type = other DNA
aaaaggtggaagagcagaaacctaaggaaactcctgttgagactcctaaggaagaaactcagaagcctcaaaaggtggaa

SEQ ID NO: 22043 - DNA, 80 bp, synthetic construct
  misc_feature 1..80: note = Synthetic: >KY292377_3-cand-20-99
  source 1..80: mol_type = other DNA
ctagtttgcaaggtttgtatacttattctaacttggtggagttacaaaactatgattgccctttttcaccacagcagttt

SEQ ID NO: 22044 - DNA, 80 bp, synthetic construct
  misc_feature 1..80: note = Synthetic: >HQ012369_1-cand-1070-1149
  source 1..80: mol_type = other DNA
aaagatggtgctatgattacgaccatgccgaaagcgcagctgggttttcaagatatttctaatttagtaaaagatcaatg

SEQ ID NO: 22045 - DNA, 80 bp, synthetic construct
  misc_feature 1..80: note = Synthetic: >HQ392470_1-cand-440-519
  source 1..80: mol_type = other DNA
attttgaaataactcaggctaatggtagtgtggtgaatgttactagcctatgtgttcaagcaagacagttggcgttattt

SEQ ID NO: 22046 - DNA, 80 bp, synthetic construct
  misc_feature 1..80: note = Synthetic: >MG916901_7-cand-30-109
  source 1..80: mol_type = other DNA
aaataatgtcacacttagagtctctaaaaagtgtcggtgttgctactcctgtagaggaagttgcaccacctgtagagacc

SEQ ID NO: 22047 - DNA, 80 bp, synthetic construct
  misc_feature 1..80: note = Synthetic: >GCS_003_11-cand-360-439
  source 1..80: mol_type = other DNA
tagatacactaggccaagtttaccagctctataatgctcatgatgacatacttacaccgttagtgtctgcaggcatattt

SEQ ID NO: 22048 - DNA, 80 bp, synthetic construct
  misc_feature 1..80: note = Synthetic: >KY417143_1-cand-40-119
  source 1..80: mol_type = other DNA
aaattgctgcttattttgttggtaacttaaaatatagtaccttcatgcttaattttaatgagaatgggactattactgat

SEQ ID NO: 22049 - DNA, 80 bp, synthetic construct
  misc_feature 1..80: note = Synthetic: >KF668605_1-cand-20-99
  source 1..80: mol_type = other DNA
ctacacctgttaatggcatgcattggtcatctcgtaatggagtgtgttcaacacattgcaattttagtacaattgttgtt

SEQ ID NO: 22050 - DNA, 80 bp, synthetic construct
  misc_feature 1..80: note = Synthetic: >MK472069_7-cand-120-199
  source 1..80: mol_type = other DNA
cgtttctttggaaacatgatggtcatgggcttgtttgtgtttatgttctggtctgagcttctttcttattccacactgtt

SEQ ID NO: 22051 - DNA, 80 bp, synthetic construct
  misc_feature 1..80: note = Synthetic: >KX512809_7-cand-140-219
  source 1..80: mol_type = other DNA
aacatgtcgttggtagctgtagatatgcagagtgtttcacttattgtgttgtgtttgcttgtagcaattgttcattgcta

SEQ ID NO: 22052 - DNA, 80 bp, synthetic construct
  misc_feature 1..80: note = Synthetic: >MK720945_7-cand-240-319
  source 1..80: mol_type = other DNA
gactgttgtaataataagcgtgtggtcactacacctgtgttcaattcaagtgtgcttcgtgctggttatgaagatgggtt

SEQ ID NO: 22053 - DNA, 80 bp, synthetic construct
  misc_feature 1..80: note = Synthetic: >GQ504722_3-cand-100-179
  source 1..80: mol_type = other DNA
aacgaccagtttatttataatagaacacttggcgctgccggtccttatgcaaattttaaggcatggcagtgtttaagtaa

SEQ ID NO: 22054 - DNA, 80 bp, synthetic construct
  misc_feature 1..80: note = Synthetic: >MG596803_2-cand-0-79
  source 1..80: mol_type = other DNA
aatgcagatggtgatgaagcttggggttcaactatgacattttcagtgcatcctgtagtatgtgatgaagatggtgagtt

SEQ ID NO: 22055 - DNA, 80 bp, synthetic construct
  misc_feature 1..80: note = Synthetic: >MK720945_4-cand-40-119
  source 1..80: mol_type = other DNA
tatttcacagcagatatgcgtgatgatcagtactttattaatggtgtgaatggcactgtttgcgtgaacacaacacagtt

SEQ ID NO: 22056 - DNA, 80 bp, synthetic construct
  misc_feature 1..80: note = Synthetic: >EF203064_1-cand-40-119
  source 1..80: mol_type = other DNA
ccgatggttttgtcaatggtcttcaatgtaagttgagactttttgatattccgcctggcgtatattctaatagtgaagtt

SEQ ID NO: 22057 - DNA, 80 bp, synthetic construct
  misc_feature 1..80: note = Synthetic: >KX722530_2-cand-100-179
  source 1..80: mol_type = other DNA
aacttctccatcagtgcagtagagaattatggcttttggactatagcttatactaactatacagatgtaatggtggatgt

SEQ ID NO: 22058 - DNA, 80 bp, synthetic construct
  misc_feature 1..80: note = Synthetic: >KU762338_11-cand-390-469
  source 1..80: mol_type = other DNA
aagagtatttagattttcctgacaagtgctttcccacgaagcccaaggctaagcgtggaggaaacacctttctaacagat

SEQ ID NO: 22059 - DNA, 80 bp, synthetic construct
  misc_feature 1..80: note = Synthetic: >MK472068_9-cand-920-999
  source 1..80: mol_type = other DNA
accagaaaaaagatttgatttgcttgcagagacccattgtgatcaatggaaacctaatcacccaggctttcttaaagctt

SEQ ID NO: 22060 - DNA, 80 bp, synthetic construct
  misc_feature 1..80: note = Synthetic: >KJ473810_3-cand-0-79
  source 1..80: mol_type = other DNA
aagtttgctacgctcgggtgtggaagatggtgtctgtcaacatggcaataagtactatagcagacttgtttctgtgaaag

SEQ ID NO: 22061 - DNA, 80 bp, synthetic construct
  misc_feature 1..80: note = Synthetic: >FJ938056_3-cand-30-109
  source 1..80: mol_type = other DNA
aggcttgtacacctattctaacctggtggagttacagaattatgactgtcctttctcgccacagcagtttaataattatt

SEQ ID NO: 22062 - DNA, 80 bp, synthetic construct
  misc_feature 1..80: note = Synthetic: >MN514965_2-cand-190-269
  source 1..80: mol_type = other DNA
gatatatattttgttaaaaatattcctcattatgctagtgctgttgtacaagcatttcggagtgttgctaaagttgtatt

SEQ ID NO: 22063 - DNA, 80 bp, synthetic construct
  misc_feature 1..80: note = Synthetic: >GQ427174_1-cand-280-359
  source 1..80: mol_type = other DNA
gcaactttttctttaattctaagaatttcacaggtttccctaaagttaaaagtgttatattcattgccactggagatatt

SEQ ID NO: 22064 - DNA, 80 bp, synthetic construct
  misc_feature 1..80: note = Synthetic: >KX574227_4-cand-500-579
  source 1..80: mol_type = other DNA
tctagatatggtttatgtcatcactgttaagtatgaaccaggcgctgaaactgtatgtcccaaacaagtgcgtcctgatt

SEQ ID NO: 22065 - DNA, 80 bp, synthetic construct
  misc_feature 1..80: note = Synthetic: >FJ376619_7-cand-150-229
  source 1..80: mol_type = other DNA
caggtaagtcttttcaagtgactccttgtgactcacctgcgcaacttgtagttgtatctaatacaattgttggtgccatt

SEQ ID NO: 22066 - DNA, 80 bp, synthetic construct
  misc_feature 1..80: note = Synthetic: >KX512809_8-cand-110-189
  source 1..80: mol_type = other DNA
aattgtctctacagacactgttaacacttctaaatcttttgcttctagtgagcaacgtattgtttttaatagcgaacatg

SEQ ID NO: 22067 - DNA, 80 bp, synthetic construct
  misc_feature 1..80: note = Synthetic: >FJ938058_3-cand-100-179
  source 1..80: mol_type = other DNA
aatttctccatcagttctgttgaaaattatggcttttggaccatagcctatactaactacacagatgtaatggtagatgt

SEQ ID NO: 22068 - DNA, 80 bp, synthetic construct
  misc_feature 1..80: note = Synthetic: >MH938449_12-cand-980-1059
  source 1..80: mol_type = other DNA
acaaataacactactggcagtatgacttccaacgagactattccagttgctgatgtcatcgtgcatctccgtaattggaa

SEQ ID NO: 22069 - DNA, 80 bp, synthetic construct
  misc_feature 1..80: note = Synthetic: >JQ989271_3-cand-390-469
  source 1..80: mol_type = other DNA
aggtttaccctgttaaagacagtgttacgtgggttgttaataccacagctgatggacgtgttaaagactactctatttgt

SEQ ID NO: 22070 - DNA, 80 bp, synthetic construct
  misc_feature 1..80: note = Synthetic: >GCS_264b_3-cand-170-249
  source 1..80: mol_type = other DNA
atgtatggcttgccatgatagcagggctagtaggtttagttctagcagtcattatgctactttgcatgacaaactgctgt

SEQ ID NO: 22071 - DNA, 80 bp, synthetic construct
  misc_feature 1..80: note = Synthetic: >EU022525_2-cand-90-169
  source 1..80: mol_type = other DNA
acaggttgctttaatcaaactaatcaaactgatagcacctgtgcaaatggactttatagagggtcgccaggtaattttac

SEQ ID NO: 22072 - DNA, 80 bp, synthetic construct
  misc_feature 1..80: note = Synthetic: >MK720945_5-cand-400-479
  source 1..80: mol_type = other DNA
cagctcagtgctcgtcttgagtcagttgaagttgcaaatacaatatctgtctcttctgaagcattgcagcttgctaatgt

SEQ ID NO: 22073 - DNA, 80 bp, synthetic construct
  misc_feature 1..80: note = Synthetic: >KJ473812_1-cand-1340-1419
  source 1..80: mol_type = other DNA
accaaaattatccacttcattggttaagaaccagtgcgtcaacttcaactttaatggatttaaaggtactggtgtgttga

SEQ ID NO: 22074 - DNA, 80 bp, synthetic construct
  misc_feature 1..80: note = Synthetic: >MH938450_11-cand-1150-1229
  source 1..80: mol_type = other DNA
tctacaattaaaaatcggcttgaaatcacaagctgcccaaattattattagtgatttagtttaaactgactaacactggt

SEQ ID NO: 22075 - DNA, 80 bp, synthetic construct
  misc_feature 1..80: note = Synthetic: >HQ012372_2-cand-0-79
  source 1..80: mol_type = other DNA
ttattgtgccggttatgctaagaatgtctttgtgccaattgatggcaaaataccagaaagcttttcttttagtaactggt

SEQ ID NO: 22076 - DNA, 80 bp, synthetic construct
  misc_feature 1..80: note = Synthetic: >SBB_053_1-cand-240-319
  source 1..80: mol_type = other DNA
acccaatgacactatgatcaattgcacacaacctttaggaggtggtttgtgtgctgatcttgcaaataatgtcactgtta

SEQ ID NO: 22077 - DNA, 80 bp, synthetic construct
  misc_feature 1..80: note = Synthetic: >MH938449_5-cand-330-409
  source 1..80: mol_type = other DNA
atgtcatcttggctttcctcaagcatatcttctttggatgtgagaaacctaactgtattgcttgttccaaaagttgccgt

SEQ ID NO: 22078 - DNA, 80 bp, synthetic construct
  misc_feature 1..80: note = Synthetic: >GCS_265a_7-cand-0-79
  source 1..80: mol_type = other DNA
acgtaaaattagcagaccatgtgtttttgaagtgtgctgatattgttcaagaagcaaaggagtacacttattctgttttg

SEQ ID NO: 22079 - DNA, 80 bp, synthetic construct
  misc_feature 1..80: note = Synthetic: >MH938450_9-cand-230-309
  source 1..80: mol_type = other DNA
acgttacggaatgtcttgaacatcttcttaaaggtgttaaatcctgcactatcacatgtgatagttgttgtgaatgtggc

SEQ ID NO: 22080 - DNA, 80 bp, synthetic construct
  misc_feature 1..80: note = Synthetic: >GCS_264a_9-cand-560-639
  source 1..80: mol_type = other DNA
cctttggtacatttatgtgcaagcatagtattgccaaaggtgtactgccgcatactacatggggtgttagactaatcagt

SEQ ID NO: 22081 - DNA, 80 bp, synthetic construct
  misc_feature 1..80: note = Synthetic: >FJ938054_4-cand-290-369
  source 1..80: mol_type = other DNA
atatatatggctttcaaggcacaggcattattagaagtaccacatcaagattggtcgctggtctttactacacctcagct

SEQ ID NO: 22082 - DNA, 80 bp, synthetic construct
  misc_feature 1..80: note = Synthetic: >GCS_264a_7-cand-750-829
  source 1..80: mol_type = other DNA
tgctaagagagttagatcaactgtttgtgaaacttgtggcgaagaccgtcaagttataactggtgtagatgcctgcacct

SEQ ID NO: 22083 - DNA, 80 bp, synthetic construct
  misc_feature 1..80: note = Synthetic: >MH687942_2-cand-630-709
  source 1..80: mol_type = other DNA
agtctaacagaccagtgacatttggtatcccattgggtaatacggaggtgccctattattgttttctaaaattgtccaat

SEQ ID NO: 22084 - DNA, 80 bp, synthetic construct
  misc_feature 1..80: note = Synthetic: >GCS_265a_6-cand-310-389
  source 1..80: mol_type = other DNA
agtggtgacttgacaactgtaaagtctacggtccccttgtatggcttaaaatccacattggtacttaagggtgttactta

SEQ ID NO: 22085 - DNA, 80 bp, synthetic construct
  misc_feature 1..80: note = Synthetic: >GCS_264a_7-cand-660-739
  source 1..80: mol_type = other DNA
agtgttaatggttttaggcaaagtgagtcctggtgaaagtgatgatgcacatcgtgtgttatctacagtcttttgtcatg

SEQ ID NO: 22086 - DNA, 80 bp, synthetic construct
  misc_feature 1..80: note = Synthetic: >KX512809_6-cand-0-79
  source 1..80: mol_type = other DNA
tgggtggcatacgaacaggcacgtgacgcgtatatggagggtaagaagaatgatcttgcagcaccagttattaaacaact

SEQ ID NO: 22087 - DNA, 80 bp, synthetic construct
  misc_feature 1..80: note = Synthetic: >KJ473813_1-cand-1420-1499
  source 1..80: mol_type = other DNA
cgtctaaaacgtttcagtcttttcagcagtttggtcgggatgcatctgattttactgattcagtgcgtgacccgcaaact

SEQ ID NO: 22088 - DNA, 80 bp, synthetic construct
  misc_feature 1..80: note = Synthetic: >MK720945_8-cand-720-799
  source 1..80: mol_type = other DNA
agttttaattttacgttcacttgcactaatgacactgatattaccagaggtgagcgaatggtaccttttgggtttattga

SEQ ID NO: 22089 - DNA, 80 bp, synthetic construct
  misc_feature 1..80: note = Synthetic: >HQ012369_1-cand-990-1069
  source 1..80: mol_type = other DNA
cagctgtggcaggttgtaggtggtcgctagttcatgatgttaggtggcgtacacagttcgctactattactgtttcctat

SEQ ID NO: 22090 - DNA, 80 bp, synthetic construct
  misc_feature 1..80: note = Synthetic: >GCS_003_5-cand-0-79
  source 1..80: mol_type = other DNA
atataactgggtctattattatgggcgcatgcttagctgttgccatttctatggttctctattacctgcttaaattcagg

SEQ ID NO: 22091 - DNA, 80 bp, synthetic construct
  misc_feature 1..80: note = Synthetic: >PRD_0038_5-cand-580-659
  source 1..80: mol_type = other DNA
atgcttctgtttattttgtaggccatttaaaacctctcactatgcttgctgaatttgatgaaaacggcaccattactgat

SEQ ID NO: 22092 - DNA, 80 bp, synthetic construct
  misc_feature 1..80: note = Synthetic: >GCS_264a_9-cand-830-909
  source 1..80: mol_type = other DNA
ttactgtgcgcgctatgacccaattaccaattacttatgcacctagtaagagaggccgttacacaatccctattaaggat

SEQ ID NO: 22093 - DNA, 80 bp, synthetic construct
  misc_feature 1..80: note = Synthetic: >MG596803_3-cand-30-109
  source 1..80: mol_type = other DNA
caaatataacattagcctatcaaggtttgtttcccaaacagggtgaccagggtcaaatgtatttatattcagcagcccat

SEQ ID NO: 22094 - DNA, 80 bp, synthetic construct
  misc_feature 1..80: note = Synthetic: >MK211373_8-cand-30-109
  source 1..80: mol_type = other DNA
tgcagcattaacaagtttatatagggaatttattgccactgttactagagtcgttagtgttggcagtgttgcatttacat

SEQ ID NO: 22095 - DNA, 80 bp, synthetic construct
  misc_feature 1..80: note = Synthetic: >MH687942_2-cand-720-799
  source 1..80: mol_type = other DNA
gcactatcaagtttttgggtgtgttgccacctgctgtacgagagattgtcgtcacaaagtttggtggtgtttacattaat

SEQ ID NO: 22096 - DNA, 80 bp, synthetic construct
  misc_feature 1..80: note = Synthetic: >GCS_264a_9-cand-1190-1269
  source 1..80: mol_type = other DNA
attatcttcttgtttccaaaataaatatgtgtctggttgtgtgggtcttgagaatcgctgtaagcatggagaagtgcaca

SEQ ID NO: 22097 - DNA, 80 bp, synthetic construct
  misc_feature 1..80: note = Synthetic: >MK211373_10-cand-600-679
  source 1..80: mol_type = other DNA
caattaactataactgctaacaccctagagcgtgttgattttcacttagctagtagcaggaaagtctgtcagggtagtca

SEQ ID NO: 22098 - DNA, 80 bp, synthetic construct
  misc_feature 1..80: note = Synthetic: >MH687937_1-cand-60-139
  source 1..80: mol_type = other DNA
tgatactctgtgtttttccacaacacagttggccggcgcttgcaagtttaatttttatgtgtacgcagaagttctctatg

SEQ ID NO: 22099 - DNA, 80 bp, synthetic construct
  misc_feature 1..80: note = Synthetic: >FJ938059_4-cand-150-229
  source 1..80: mol_type = other DNA
catagcctgttatagcagtgctaatgtcactgattttcaacccgcaaatcaaagcgtctctcacatcccatttggaaaaa

SEQ ID NO: 22100 - DNA, 80 bp, synthetic construct
  misc_feature 1..80: note = Synthetic: >KP143507_1-cand-140-219
  source 1..80: mol_type = other DNA
catggtgtttattttgacgtacgtgagcacaattcagatggtgtgtgggatccacgcgaccgtgtaggtttactcatagc

SEQ ID NO: 22101 - DNA, 80 bp, synthetic construct
  misc_feature 1..80: note = Synthetic: >MK720945_6-cand-200-279
  source 1..80: mol_type = other DNA
cattgctgctgcagtgaaacaagcactcaaagagctgggtttttcagctgataaaaagcaaagtcagaagggcaattcta

SEQ ID NO: 22102 - DNA, 80 bp, synthetic construct
  misc_feature 1..80: note = Synthetic: >MK907287_2-cand-240-319
  source 1..80: mol_type = other DNA
cgatggagtatgtttctcctttgacacaacgtctcctagatgctctatctaaagctatgcgcttgttgcataagaaagta

SEQ ID NO: 22103 - DNA, 80 bp, synthetic construct
  misc_feature 1..80: note = Synthetic: >KY292377_1-cand-0-79
  source 1..80: mol_type = other DNA
ggcatacttccaccaactgttcgagagtttgcattcggtagggatggatccatttttgttaatggctataaatatttcag

SEQ ID NO: 22104 - DNA, 80 bp, synthetic construct
  misc_feature 1..80: note = Synthetic: >KX574227_5-cand-0-79
  source 1..80: mol_type = other DNA
tttactgtcactttctgaacaacatttagccatggatatatctcccattgcaattttccttcgcaatgtgcgttttgagc

SEQ ID NO: 22105 - DNA, 80 bp, synthetic construct
  misc_feature 1..80: note = Synthetic: >GQ153542_1-cand-340-419
  source 1..80: mol_type = other DNA
gggaccatcacggatgctgtggattgttcccaaaacccacttgctgaattaaaatgcaccattaaaaattttaatgttga

SEQ ID NO: 22106 - DNA, 80 bp, synthetic construct
  misc_feature 1..80: note = Synthetic: >GCS_265b_3-cand-180-259
  source 1..80: mol_type = other DNA
gtagtgttagatgatttgtataaacctgttagcgtaatctgtccttgtggcagaccggctataaggtatgtctcagaaca

SEQ ID NO: 22107 - DNA, 80 bp, synthetic construct
  misc_feature 1..80: note = Synthetic: >GCS_003_6-cand-40-119
  source 1..80: mol_type = other DNA
gtatgtacatagttagtgcatttttatggctgtgttacaaaggttttgtacatgttcggtatggttgcaccaatgtatca

SEQ ID NO: 22108 - DNA, 80 bp, synthetic construct
  misc_feature 1..80: note = Synthetic: >MG596802_4-cand-0-79
  source 1..80: mol_type = other DNA
ttttagttctcaatggtttagctgagtcctttaagaaggttgctgccgttccgtataaggtttgctgcactttacgtgac

SEQ ID NO: 22109 - DNA, 80 bp, synthetic construct
  misc_feature 1..80: note = Synthetic: >GCS_264b_10-cand-90-169
  source 1..80: mol_type = other DNA
tctgcaggtgttgtaaaacctggctgcgtattgctgctggacaagagtccgggtatgcgcattattcctggtaatcgcac

SEQ ID NO: 22110 - DNA, 80 bp, synthetic construct
  misc_feature 1..80: note = Synthetic: >HQ392469_3-cand-90-169
  source 1..80: mol_type = other DNA
taagagtgtcaaattctccattagctcagttgagcagtatgggttttggaccatagcctataccaattatacagatgtaa

SEQ ID NO: 22111 - DNA, 80 bp, synthetic construct
  misc_feature 1..80: note = Synthetic: >SBB_041_2-cand-10-89
  source 1..80: mol_type = other DNA
tgtcacagtgcgtttgtgtaagtggtttaatacaaattctttcaatgctacgggttatggtgttgatgcacaagctggta

SEQ ID NO: 22112 - DNA, 80 bp, synthetic construct
  misc_feature 1..80: note = Synthetic: >HM211099_1-cand-20-99
  source 1..80: mol_type = other DNA
aaaaacctgagctcctgttaaaggttgctcgctgtgtaccgttattgtcatcaaatgtgtttgcctttgtgtgtctgtgc

SEQ ID NO: 22113 - DNA, 80 bp, synthetic construct
  misc_feature 1..80: note = Synthetic: >MK472069_10-cand-360-439
  source 1..80: mol_type = other DNA
gactgtgcgcaacttcggtgctacactttatgttctctacacacctggtgattcaattacaagtgtcccaccttcttttt

SEQ ID NO: 22114 - DNA, 80 bp, synthetic construct
  misc_feature 1..80: note = Synthetic: >FJ938057_3-cand-220-299
  source 1..80: mol_type = other DNA
atcgtagtttgaatcttgcaaccgttgaaaagtttaacacaacagttctaggtggtgaaagagtgggtggtccatatttt

SEQ ID NO: 22115 - DNA, 80 bp, synthetic construct
  misc_feature 1..80: note = Synthetic: >GQ504722_3-cand-1000-1079
  source 1..80: mol_type = other DNA
gtttatggtattactggcagaggacttattactaatattactgagtccgttcatccaggttatttagaccatggtggttt

SEQ ID NO: 22116 - DNA, 80 bp, synthetic construct
  misc_feature 1..80: note = Synthetic: >KJ473813_1-cand-230-309
  source 1..80: mol_type = other DNA
tatacgtgtgtgctattttaacctctgtaaagatcccatgtataccgtgtctgctggcacccaagtgtcctcatgggttt

SEQ ID NO: 22117 - DNA, 80 bp, synthetic construct
  misc_feature 1..80: note = Synthetic: >KX722529_3-cand-20-99
  source 1..80: mol_type = other DNA
ccagtttacaaggtttgtatacttattctaatttagtggaggtacaaaatcatgattgccctttctcgccacagcagttt

SEQ ID NO: 22118 - DNA, 80 bp, synthetic construct
  misc_feature 1..80: note = Synthetic: >GCS_019_10-cand-160-239
  source 1..80: mol_type = other DNA
aaagaacagtcaaagtggaaagaacactccaaagagtggtagtgccacccctaaaaagcagaaatcccgtgcttcatcac

SEQ ID NO: 22119 - DNA, 80 bp, synthetic construct
  misc_feature 1..80: note = Synthetic: >PDF_2370_4-cand-510-589
  source 1..80: mol_type = other DNA
atactcaagttaccttttggcctaaatataacgcagtttaaagtcattatgactttgttttcacctactacaagttcttt

SEQ ID NO: 22120 - DNA, 80 bp, synthetic construct
  misc_feature 1..80: note = Synthetic: >PDF_2370_3-cand-110-189
  source 1..80: mol_type = other DNA
gtgaaagacaacccaccacagtttctttcactcctgtcatcttgattgtgtgcacattactttttctcatttacttcttt

SEQ ID NO: 22121 - DNA, 80 bp, synthetic construct
  misc_feature 1..80: note = Synthetic: >MK492263_6-cand-100-179
  source 1..80: mol_type = other DNA
aatctccaccatggaggtggtgttgcaggtgcattaaatcgtgccactaacaatgagatgcagaaagagtcatctgcttt

SEQ ID NO: 22122 - DNA, 80 bp, synthetic construct
  misc_feature 1..80: note = Synthetic: >MH938449_10-cand-630-709
  source 1..80: mol_type = other DNA
aaatatgttagtcttgtgtctggacctgctacgcatgtctctgtgaaacgtgtcgaaaaatctgatgctaatttaactct

SEQ ID NO: 22123 - DNA, 80 bp, synthetic construct
  misc_feature 1..80: note = Synthetic: >GQ504722_2-cand-110-189
  source 1..80: mol_type = other DNA
tgtttgataaagtagaatcacttggtttacctggtgactctgcttaccaaaaatgtacatctggacctctaggttttgtt

SEQ ID NO: 22124 - DNA, 80 bp, synthetic construct
  misc_feature 1..80: note = Synthetic: >KU762338_10-cand-580-659
  source 1..80: mol_type = other DNA
agtgttgtgcgtgtgcatagtcattgtaggctgtgcggtcttgcttatactgcagtttatagttagtacttgtacctgtt

SEQ ID NO: 22125 - DNA, 80 bp, synthetic construct
  misc_feature 1..80: note = Synthetic: >MK211373_5-cand-30-109
  source 1..80: mol_type = other DNA
aacatctgattgctgcaacacaaagcgtgttgttaacacacctgtttataatgctagtgttttgcggtcaggttatgaag

SEQ ID NO: 22126 - DNA, 80 bp, synthetic construct
  misc_feature 1..80: note = Synthetic: >GU393332_3-cand-750-829
  source 1..80: mol_type = other DNA
acctatatcaggtggttgcaaacaatctgtttggcaaaatgaggcaacatgttgctttgcttataaatacaatggtggtt

SEQ ID NO: 22127 - DNA, 80 bp, synthetic construct
  misc_feature 1..80: note = Synthetic: >MK211379_5-cand-260-339
  source 1..80: mol_type = other DNA
aaccacttgagtaaagtgttaggtttgcaagtgagtgatactcaacttagggttaataagttgagtaaaactgttatctg

SEQ ID NO: 22128 - DNA, 80 bp, synthetic construct
  misc_feature 1..80: note = Synthetic: >GQ504723_3-cand-430-509
  source 1..80: mol_type = other DNA
aacgcagagttatgcgagatacacctgttatggcatattttgtgaatggcacagtgcaagatgtcatactatgtgatgac

SEQ ID NO: 22129 - DNA, 80 bp, synthetic construct
  misc_feature 1..80: note = Synthetic: >KC869678_3-cand-960-1039
  source 1..80: mol_type = other DNA
tctaacagtcgattggtttgcttttccttatgcttggaaatcttaccttgctataggttctgctgaccgtatcgtacgtt

SEQ ID NO: 22130 - DNA, 80 bp, synthetic construct
  misc_feature 1..80: note = Synthetic: >PDF_2370_4-cand-150-229
  source 1..80: mol_type = other DNA
aacgttatacgtggttggatctttggttctacgctagacaacacaactcagtcagctgtgctttttaataatggtacgca

SEQ ID NO: 22131 - DNA, 80 bp, synthetic construct
  misc_feature 1..80: note = Synthetic: >JQ989271_2-cand-130-209
  source 1..80: mol_type = other DNA
aactaatgctgctactgatgggaacacttacgagggtgtagttattaatgtcaattgtccttttgactttgacaacctta

SEQ ID NO: 22132 - DNA, 80 bp, synthetic construct
  misc_feature 1..80: note = Synthetic: >HQ012371_3-cand-550-629
  source 1..80: mol_type = other DNA
tatacctattccaatctggtggaattacaaaattatgactgcccattttcgccacagcattttaataattatttgcagtt

SEQ ID NO: 22133 - DNA, 80 bp, synthetic construct
  misc_feature 1..80: note = Synthetic: >JQ989270_2-cand-40-119
  source 1..80: mol_type = other DNA
aactgttaattatgtacgtgatgagatagcattaactggaggtggtgagttgacttgtgttaatacaacacaattcacca

SEQ ID NO: 22134 - DNA, 80 bp, synthetic construct
  misc_feature 1..80: note = Synthetic: >HM245926_9-cand-430-509
  source 1..80: mol_type = other DNA
aacttcttagtagtgctcaaactgccaaagtgaagttgtcagccctatgtaactgtggcactatggaagaactaatttca

SEQ ID NO: 22135 - DNA, 80 bp, synthetic construct
  misc_feature 1..80: note = Synthetic: >MG916902_9-cand-0-79
  source 1..80: mol_type = other DNA
aagaaggatgaccgcattcaaatcaatggttttaatgactctttttgtgtgaacacaacacagttcactacaaattttgt

SEQ ID NO: 22136 - DNA, 80 bp, synthetic construct
  misc_feature 1..80: note = Synthetic: >FJ938054_4-cand-200-279
  source 1..80: mol_type = other DNA
aagatggtgcaatgattactactatgccaaaggcacagctgggttttcaggacatctccaatattgttaaagatgaatgt

SEQ ID NO: 22137 - DNA, 80 bp, synthetic construct
  misc_feature 1..80: note = Synthetic: >HQ012371_2-cand-100-179
  source 1..80: mol_type = other DNA
aagattttcactagacaccaaattgtcagctaacgacttctatggcttccagtggactgatacatatgtagacatctatt

SEQ ID NO: 22138 - DNA, 80 bp, synthetic construct
  misc_feature 1..80: note = Synthetic: >KJ473811_1-cand-110-189
  source 1..80: mol_type = other DNA
aagccactagagtcgttgttctttcctttgaacttcttaatgcacctgctacagtgtgtggaccaaaattatccactcca

SEQ ID NO: 22139 - DNA, 80 bp, synthetic construct
  misc_feature 1..80: note = Synthetic: >KY073746_10-cand-300-379
  source 1..80: mol_type = other DNA
gggcaaaccgtggttttatgaaaagtctcactatggcctagagtttcttgccattagtggaggtgatcactatgtcgctt

SEQ ID NO: 22140 - DNA, 80 bp, synthetic construct
  misc_feature 1..80: note = Synthetic: >KY073745_11-cand-1360-1439
  source 1..80: mol_type = other DNA
aagctttataatgaatttctgggtttaacctgcaaagctgttaaaactgctggtgtgacttttaagttttatgcagttga

SEQ ID NO: 22141 - DNA, 80 bp, synthetic construct
  misc_feature 1..80: note = Synthetic: >KM347965_7-cand-170-249
  source 1..80: mol_type = other DNA
accgttgtacgagctttaagcagaatgtagctatacttattttcaagatcgtggctatgtgttttattgcaccattactt

SEQ ID NO: 22142 - DNA, 80 bp, synthetic construct
  misc_feature 1..80: note = Synthetic: >KJ473810_5-cand-0-79
  source 1..80: mol_type = other DNA
cagaggttaaacaaatcctaccttttagaaaggagggtaaattcgacttctatgaaatcgaggcagcagacttggcactt

SEQ ID NO: 22143 - DNA, 80 bp, synthetic construct
  misc_feature 1..80: note = Synthetic: >PDF_2370_4-cand-690-769
  source 1..80: mol_type = other DNA
tctcaggaccctctttctgagctaaaatgtaccactaaaagccttactgtggaaaaaggaatttaccaaacttcaaactt

SEQ ID NO: 22144 - DNA, 80 bp, synthetic construct
  misc_feature 1..80: note = Synthetic: >GQ504723_3-cand-970-1049
  source 1..80: mol_type = other DNA
atggtggttctcgtaattgtaaaggtctttacacttttgatagggatgttaattatgagtgtgtacttttagtttttatt

SEQ ID NO: 22145 - DNA, 80 bp, synthetic construct
  misc_feature 1..80: note = Synthetic: >KF663559_1-cand-20-99
  source 1..80: mol_type = other DNA
ctacacctgttaatggcatgcagtggtcatctattaatggagtgtgttcaatacattgcaattttagtacaattgttatt

SEQ ID NO: 22146 - DNA, 80 bp, synthetic construct
  misc_feature 1..80: note = Synthetic: >KM347965_7-cand-280-359
  source 1..80: mol_type = other DNA
attaccatagttgtacttttagcaaggttttgttatttaagctacttttggttcaggttcaagcgttttgagtttgtatt

SEQ ID NO: 22147 - DNA, 80 bp, synthetic construct
  misc_feature 1..80: note = Synthetic: >MK211372_2-cand-0-79
  source 1..80: mol_type = other DNA
gtgtgttgagagttgttgcagatgtacctttaatgtttaagagtgcatttgacacacttgttaacgccattggttgtatt

SEQ ID NO: 22148 - DNA, 80 bp, synthetic construct
  misc_feature 1..80: note = Synthetic: >MN611521_2-cand-310-389
  source 1..80: mol_type = other DNA
aatacttcgtatttagctggtctatattacacatcaactagtggccagttgcttgcctttaagaatgttaccagtggtgt

SEQ ID NO: 22149 - DNA, 80 bp, synthetic construct
  misc_feature 1..80: note = Synthetic: >MG916901_6-cand-230-309
  source 1..80: mol_type = other DNA
aatcatacacgacatacgctggtgatattaaggatggtcattacactgtttttgctagttgtggcaaagtttatgatggt

SEQ ID NO: 22150 - DNA, 80 bp, synthetic construct
  misc_feature 1..80: note = Synthetic: >KY770858_1-cand-0-79
  source 1..80: mol_type = other DNA
tagttttaattgtacctttgagtatgtttctagggctttctctcttgatatacgcgagcagtcaggtaattttgtggatt

SEQ ID NO: 22151 - DNA, 80 bp, synthetic construct
  misc_feature 1..80: note = Synthetic: >PDF_2370_4-cand-420-499
  source 1..80: mol_type = other DNA
aatgtggatggctttctttatgtctaccataattatgaaagagcaaatgtttacgacaacttcccatcagggttttctgt

SEQ ID NO: 22152 - DNA, 80 bp, synthetic construct
  misc_feature 1..80: note = Synthetic: >PDF_2370_4-cand-240-319
  source 1..80: mol_type = other DNA
aatgtgtgtaacttttatttttgccaagaccctatgctaacagtggctaatggttctcattacaaatcttgggtttttct

SEQ ID NO: 22153 - DNA, 80 bp, synthetic construct
  misc_feature 1..80: note = Synthetic: >EU022525_2-cand-770-849
  source 1..80: mol_type = other DNA
ttatctatgggatcaggataagttgtgtatattagggtctgaaatatatgtgccggggtataaggtttatacgcaacatt

SEQ ID NO: 22154 - DNA, 80 bp, synthetic construct
  misc_feature 1..80: note = Synthetic: >PDF_2370_4-cand-330-409
  source 1..80: mol_type = other DNA
aattgcacatacaatcgtgtacatgcttttgagattgaccctagtttaaatacaggtgcctttatacatttaagagaaca

SEQ ID NO: 22155 - DNA, 80 bp, synthetic construct
  misc_feature 1..80: note = Synthetic: >KP886809_1-cand-330-409
  source 1..80: mol_type = other DNA
aattgcacatatgatagagtggaaaaaagcttccaattagacacagcccctaagagtggtaattttattgccttacgtga

SEQ ID NO: 22156 - DNA, 80 bp, synthetic construct
  misc_feature 1..80: note = Synthetic: >KJ473797_2-cand-170-249
  source 1..80: mol_type = other DNA
aattgttggtgcctcatgggctggtgataaggttgtcctctatactcgtagagggcttactaccttttatgtccctggtg

SEQ ID NO: 22157 - DNA, 80 bp, synthetic construct
  misc_feature 1..80: note = Synthetic: >KU182964_2-cand-50-129
  source 1..80: mol_type = other DNA
acaattcatggaaccaggcttattcttcacctgtcttgccttttgggcatggtgtttacttttcaaccattgacaaatcc

SEQ ID NO: 22158 - DNA, 80 bp, synthetic construct
  misc_feature 1..80: note = Synthetic: >KX512809_14-cand-780-859
  source 1..80: mol_type = other DNA
gtagttttagaaccagtagtaactcttgactcacaactggcttctaaggttgttaataagaacgtgttatgtgatggtgt

SEQ ID NO: 22159 - DNA, 80 bp, synthetic construct
  misc_feature 1..80: note = Synthetic: >HQ012368_2-cand-90-169
  source 1..80: mol_type = other DNA
acagcagtttaataattatttgcagtttgaaactttatgttttgatgtaaatccagctgttgcaggttgtaagtggtcat

SEQ ID NO: 22160 - DNA, 80 bp, synthetic construct
  misc_feature 1..80: note = Synthetic: >MK472069_8-cand-0-79
  source 1..80: mol_type = other DNA
cccaacgttacacccattaagcattttaatttgggtgttgattacttacttaccggcgtgtttgtttactacttcgctgt

SEQ ID NO: 22161 - DNA, 80 bp, synthetic construct
  misc_feature 1..80: note = Synthetic: >PDF_2370_2-cand-100-179
  source 1..80: mol_type = other DNA
gaaaactgatggatttatgggacgcattcgtacagtctaccaggttgcctcacccagtgagtgtaatagcatgcacctgt

SEQ ID NO: 22162 - DNA, 80 bp, synthetic construct
  misc_feature 1..80: note = Synthetic: >GQ504722_3-cand-550-629
  source 1..80: mol_type = other DNA
attgctaggtttaacattagtactatttctgaaggctatgttaattttaaatttaattttctgaatagctttacttatgt

SEQ ID NO: 22163 - DNA, 80 bp, synthetic construct
  misc_feature 1..80: note = Synthetic: >HQ012372_2-cand-580-659
  source 1..80: mol_type = other DNA
gacttctccatcagttctgttgaaaattatggcttttggactatagcctatactacttatacagatgtaatggtagatgt

SEQ ID NO: 22164 - DNA, 80 bp, synthetic construct
  misc_feature 1..80: note = Synthetic: >KX512809_7-cand-270-349
  source 1..80: mol_type = other DNA
gctttgttttctacaattttgcttcccaatggtactattatctgagaggcttagatatgggtgttaatctacagtttggt

SEQ ID NO: 22165 - DNA, 80 bp, synthetic construct
  misc_feature 1..80: note = Synthetic: >MH817484_2-cand-230-309
  source 1..80: mol_type = other DNA
tatacttcagcttgtcagacaattgaaaatgcccttaatcttggtgcacgtcttgaatctttaatgcttaatgatatggt

SEQ ID NO: 22166 - DNA, 80 bp, synthetic construct
  misc_feature 1..80: note = Synthetic: >GU393332_2-cand-130-209
  source 1..80: mol_type = other DNA
ccaaagcattaatagaacagtcatcactacatttgtagatgaagatgactttgattttgatcatgagttgtctaaatggt

SEQ ID NO: 22167 - DNA, 80 bp, synthetic construct
  misc_feature 1..80: note = Synthetic: >GCS_003_7-cand-60-139
  source 1..80: mol_type = other DNA
gtcaggagaagcagtatcgttctgctatctctgatctgttgtataataaagttaaggtagcagacccagggtttatgggt

SEQ ID NO: 22168 - DNA, 80 bp, synthetic construct
  misc_feature 1..80: note = Synthetic: >KY073746_12-cand-500-579
  source 1..80: mol_type = other DNA
gacaacagttcagagccattggcagttacatattgcttaacaacgccattgttaaggttgtcacagaaaaagtgaagggt

SEQ ID NO: 22169 - DNA, 80 bp, synthetic construct
  misc_feature 1..80: note = Synthetic: >KY073745_11-cand-800-879
  source 1..80: mol_type = other DNA
tacaggagccagtctttgctggtgaagcttcctataacattaagtttaaggaatctccgcctagtggcttcacacagcgt

SEQ ID NO: 22170 - DNA, 80 bp, synthetic construct
  misc_feature 1..80: note = Synthetic: >KJ473811_2-cand-230-309
  source 1..80: mol_type = other DNA
acttccaattttgtgacaaccctgcctttataattagggacggtgcacaaataaacactgctatctatatcaacttacgt

SEQ ID NO: 22171 - DNA, 80 bp, synthetic construct
  misc_feature 1..80: note = Synthetic: >KY073745_8-cand-360-439
  source 1..80: mol_type = other DNA
actttgagttttacaactgtaacatcaccgatcttaccggacctgaaccatttgtcttgtttacgagtccaacactcaaa

SEQ ID NO: 22172 - DNA, 80 bp, synthetic construct
  misc_feature 1..80: note = Synthetic: >KY073746_12-cand-1070-1149
  source 1..80: mol_type = other DNA
gacactgtttagagccttggtttgctgacgactatggtgttatgtgtaatgccgttggagttgacacttgcaagccttct

SEQ ID NO: 22173 - DNA, 80 bp, synthetic construct
  misc_feature 1..80: note = Synthetic: >KY073745_11-cand-720-799
  source 1..80: mol_type = other DNA
cagaatcaaggtgattggcggacaggcattttatttctgtaacggtgtataccgcttgatggcgactccaactgccgtct

SEQ ID NO: 22174 - DNA, 80 bp, synthetic construct
  misc_feature 1..80: note = Synthetic: >KJ473810_7-cand-340-419
  source 1..80: mol_type = other DNA
agatacatacagaaactttggtgatgctgatctagtcagaaatggcatagatgctaagcattatccacagttggctgaac

SEQ ID NO: 22175 - DNA, 80 bp, synthetic construct
  misc_feature 1..80: note = Synthetic: >MH687960_2-cand-210-289
  source 1..80: mol_type = other DNA
gacaacctacttatggacacactggaaccaattgtattgtggatctttcattcacaggtcaacagtttccaataggtgct

SEQ ID NO: 22176 - DNA, 80 bp, synthetic construct
  misc_feature 1..80: note = Synthetic: >KY073746_8-cand-450-529
  source 1..80: mol_type = other DNA
agcatggtgaagatcttgataagcaattgaatggtgttctgtcgtctgccatttcagattatcttagtaagaacaaggct

SEQ ID NO: 22177 - DNA, 80 bp, synthetic construct
  misc_feature 1..80: note = Synthetic: >KY938558_2-cand-500-579
  source 1..80: mol_type = other DNA
agcccctatggaaactgcccctcggtttaaatattaccaattataaggttgtgacaactttaaaacccacaaatcaggcc

SEQ ID NO: 22178 - DNA, 80 bp, synthetic construct
  misc_feature 1..80: note = Synthetic: >MK472069_9-cand-190-269
  source 1..80: mol_type = other DNA
tcaccataatactgctgttcagggcactcttatttttcctaacaagctctattcaatttatgtctgggtttttgctcgct

SEQ ID NO: 22179 - DNA, 80 bp, synthetic construct
  misc_feature 1..80: note = Synthetic: >MK211370_1-cand-190-269
  source 1..80: mol_type = other DNA
aggaccaaaacaagcaggtttgaagcatcttcaatttgcaaccgctgtccttggggatacacaaaaggtccactcatcta

SEQ ID NO: 22180 - DNA, 80 bp, synthetic construct
  misc_feature 1..80: note = Synthetic: >HQ012371_3-cand-460-539
  source 1..80: mol_type = other DNA
gcgaatggaagtgtagtgaatgttactagtttatgtgttcagacaagacagttggctttattttacaagtacactagcct

SEQ ID NO: 22181 - DNA, 80 bp, synthetic construct
  misc_feature 1..80: note = Synthetic: >GQ504723_3-cand-1330-1409
  source 1..80: mol_type = other DNA
agtatgtggtttcagggggaaatttagttggtaaacttacttctaataatcagactgttgctcagcagttgggcgacatg

SEQ ID NO: 22182 - DNA, 80 bp, synthetic construct
  misc_feature 1..80: note = Synthetic: >KU762338_15-cand-90-169
  source 1..80: mol_type = other DNA
agtgctaaccgcaaaatcatttggtgctttcaaagaactcttacagagtgaagaggttcgtctgtcgcacttctgtgcta

SEQ ID NO: 22183 - DNA, 80 bp, synthetic construct
  misc_feature 1..80: note = Synthetic: >MK472071_7-cand-1530-1609
  source 1..80: mol_type = other DNA
agttttctacacagatggcaccttctattggtttatgactgatagtgatgctgtcttggagaaaccaacctttaagactg

SEQ ID NO: 22184 - DNA, 80 bp, synthetic construct
  misc_feature 1..80: note = Synthetic: >KX512810_12-cand-860-939
  source 1..80: mol_type = other DNA
gttaacagcagttttgatgttgttaggttcaacctaaattttacgagtggtgttgtgtctgctagtggcaccacttttat

SEQ ID NO: 22185 - DNA, 80 bp, synthetic construct
  misc_feature 1..80: note = Synthetic: >GU393332_3-cand-350-429
  source 1..80: mol_type = other DNA
tatgtgatgacagtcctaaaggtagattggcttgtcagtataatactggtaatttctcagatggtttataccctgtttat

SEQ ID NO: 22186 - DNA, 80 bp, synthetic construct
  misc_feature 1..80: note = Synthetic: >JN183882_2-cand-100-179
  source 1..80: mol_type = other DNA
atccatacctaagaattttactgtcgcagtgcaggccgagtacattcagattcaagtcaaacctgttattgtggattgtg

SEQ ID NO: 22187 - DNA, 80 bp, synthetic construct
  misc_feature 1..80: note = Synthetic: >KJ473810_5-cand-140-219
  source 1..80: mol_type = other DNA
atcgccttcaatggtgttgttgagggaggtttgacttcgtgtattgaggcttatcgcaaagaaaataatgttgtgcctgc

SEQ ID NO: 22188 - DNA, 80 bp, synthetic construct
  misc_feature 1..80: note = Synthetic: >HQ392472_2-cand-800-879
  source 1..80: mol_type = other DNA
atgaatgcactgattacaatatttatggatttcagggcacaggcattattagaagtaccaaatcacgtttagtagctggc

SEQ ID NO: 22189 - DNA, 80 bp, synthetic construct
  misc_feature 1..80: note = Synthetic: >GQ504723_3-cand-1240-1319
  source 1..80: mol_type = other DNA
atgctacaggttccatagacacttttgttttacatagtgacaagctaaccagttattataaagttaatccttgtagcgac

SEQ ID NO: 22190 - DNA, 80 bp, synthetic construct
  misc_feature 1..80: note = Synthetic: >KY938558_2-cand-410-489
  source 1..80: mol_type = other DNA
atgggtttttgcacatttatggtgcttaccagcctcacgacttagacataggtgctccggctgcactaccagctcaattc

SEQ ID NO: 22191 - DNA, 80 bp, synthetic construct
  misc_feature 1..80: note = Synthetic: >DQ648856_2-cand-260-339
  source 1..80: mol_type = other DNA
ctgtaaagaccccatgtatactgtgtctgctggcacccaaaagtcctcatgggtttatcagagtgctttcaattgcacat

SEQ ID NO: 22192 - DNA, 80 bp, synthetic construct
  misc_feature 1..80: note = Synthetic: >KY938558_2-cand-320-399
  source 1..80: mol_type = other DNA
atgtggacacactacgtgacttaccattaagttttgcggaggttgatggtggttttaaacacttacgtgagtttgtattc

SEQ ID NO: 22193 - DNA, 80 bp, synthetic construct
  misc_feature 1..80: note = Synthetic: >JN183883_3-cand-440-519
  source 1..80: mol_type = other DNA
tcactgtagtaccgtgtgatttgacagcacaggtcgctgtgattaatgatgaaatagtgggagctataacagccgttaat

SEQ ID NO: 22194 - DNA, 80 bp, synthetic construct
  misc_feature 1..80: note = Synthetic: >GQ504723_3-cand-610-689
  source 1..80: mol_type = other DNA
taccgcttcatacttcttctactagctatggtgttttgcataattttacttttaataatgttactggtgtagcgcctaat

SEQ ID NO: 22195 - DNA, 80 bp, synthetic construct
  misc_feature 1..80: note = Synthetic: >HQ392472_2-cand-180-259
  source 1..80: mol_type = other DNA
taatggcactggtatcaccagattgttctattgtgactcacccatcaatagaattaagtgtcaacagctgaagcatgaat

SEQ ID NO: 22196 - DNA, 80 bp, synthetic construct
  misc_feature 1..80: note = Synthetic: >KY073746_12-cand-910-989
  source 1..80: mol_type = other DNA
gttttggaagttgagagccttgtttctcactatcgtactccctttctgagctttgttgtttctgtggagaagggtgaaat

SEQ ID NO: 22197 - DNA, 80 bp, synthetic construct
  misc_feature 1..80: note = Synthetic: >JF792616_1-cand-0-79
  source 1..80: mol_type = other DNA
gcgttatggatttaatgacgtggctacatttcatagtggtaaacatgacgttgcttatgcagaggcatgtttcactgttg

SEQ ID NO: 22198 - DNA, 80 bp, synthetic construct
  misc_feature 1..80: note = Synthetic: >KJ473810_8-cand-530-609
  source 1..80: mol_type = other DNA
tacttagtacccttttatggctaattgtgattttattcctcttgcttatctctattactttaattaagttgatacaattg

SEQ ID NO: 22199 - DNA, 80 bp, synthetic construct
  misc_feature 1..80: note = Synthetic: >PRD_0038_5-cand-760-839
  source 1..80: mol_type = other DNA
cacctagtactgaagtagtaagattccctaacataacaaacctttgtccttttggtcaagtgttcaatgcttcaaaattc

SEQ ID NO: 22200 - DNA, 80 bp, synthetic construct
  misc_feature 1..80: note = Synthetic: >GU553362_2-cand-40-119
  source 1..80: mol_type = other DNA
gttcatatcatcaatttaatgttgatctaggagatggtggtcaatgcgtgtttaaccagagattctcattggataccgtg

SEQ ID NO: 22201 - DNA, 80 bp, synthetic construct
  misc_feature 1..80: note = Synthetic: >KY073745_8-cand-720-799
  source 1..80: mol_type = other DNA
ctgtgcgcattaaatttgtcactcacacaattgaagttgttgatgagtgttttaaaccctctgttgtcactgttaaagtg

SEQ ID NO: 22202 - DNA, 80 bp, synthetic construct
  misc_feature 1..80: note = Synthetic: >FJ938056_2-cand-100-179
  source 1..80: mol_type = other DNA
ttcttacataaacactcaaaacctaaacatacaaaatgttcacggtgtttattttgacgtacgtgagcataattcagatg

SEQ ID NO: 22203 - DNA, 80 bp, synthetic construct
  misc_feature 1..80: note = Synthetic: >DQ071615_1-cand-570-649
  source 1..80: mol_type = other DNA
tacttctaatttcctaccagaaagtgctgcttattatgttggtaatttaaaatacaccactttcatgcttagttttaatg

SEQ ID NO: 22204 - DNA, 80 bp, synthetic construct
  misc_feature 1..80: note = Synthetic: >FJ938059_3-cand-190-269
  source 1..80: mol_type = other DNA
taccatcacttattcttcctttgctatttgtaatactggtgaaattagatatgttaatgtcactaaggttgaaattgtgg

SEQ ID NO: 22205 - DNA, 80 bp, synthetic construct
  misc_feature 1..80: note = Synthetic: >GCS_265b_1-cand-40-119
  source 1..80: mol_type = other DNA
cctaatgttgcttcaaatacagagccatggatggcttatttagtccagaaattggaagcactggagaccaaagttaatgg

SEQ ID NO: 22206 - DNA, 80 bp, synthetic construct
  misc_feature 1..80: note = Synthetic: >KJ473798_4-cand-20-99
  source 1..80: mol_type = other DNA
cctaagggttggatatgtcctagatttaatggtgccggtgtttatacacgtaacaatgccaatgctgtttttgttatgta

SEQ ID NO: 22207 - DNA, 80 bp, synthetic construct
  misc_feature 1..80: note = Synthetic: >KU182964_2-cand-600-679
  source 1..80: mol_type = other DNA
gggtaacttaaaacatacaactatgatgttgtcttttaatgaaaatggcactatgtccaatgctattgattgttctcagg

SEQ ID NO: 22208 - DNA, 80 bp, synthetic construct
  misc_feature 1..80: note = Synthetic: >KY073746_12-cand-90-169
  source 1..80: mol_type = other DNA
tgacgtcaatacccagatggctaaggacctccgattggcctttttgggcaaccagccctctgatgcagtcaagaatgccg

SEQ ID NO: 22209 - DNA, 80 bp, synthetic construct
  misc_feature 1..80: note = Synthetic: >GCS_019_7-cand-440-519
  source 1..80: mol_type = other DNA
ggcgatttcttgatgcacaattttgtcttgttctttacgtggttgtttaccatgtgttctttggttgtcacgactttacg

SEQ ID NO: 22210 - DNA, 80 bp, synthetic construct
  misc_feature 1..80: note = Synthetic: >MG916901_5-cand-170-249
  source 1..80: mol_type = other DNA
ctttttctgaggtgaaccatgcttttcaggaaacatcagatgcaattaatactgttgcacaagcacttggtaaagttcag

SEQ ID NO: 22211 - DNA, 80 bp, synthetic construct
  misc_feature 1..80: note = Synthetic: >PRD_0038_2-cand-40-119
  source 1..80: mol_type = other DNA
gaaaagttatgcctatttgcatggatgttagggccattatggcaaccattcagcgtaagtacaaaggtataacaatacag

SEQ ID NO: 22212 - DNA, 80 bp, synthetic construct
  misc_feature 1..80: note = Synthetic: >MH938450_8-cand-420-499
  source 1..80: mol_type = other DNA
gaaaatggtcgtgactttactaacatctcactggactcgtctaagacttttgaagaacaacttggtgtctgcaccgttgc

SEQ ID NO: 22213 - DNA, 80 bp, synthetic construct
  misc_feature 1..80: note = Synthetic: >GU553361_1-cand-470-549
  source 1..80: mol_type = other DNA
gtgattaacgatgagatagtcggagttataacagctgtcaatcaaactgatttgtttgagtttgtcaatcacacaagttc

SEQ ID NO: 22214 - DNA, 80 bp, synthetic construct
  misc_feature 1..80: note = Synthetic: >KU182964_2-cand-140-219
  source 1..80: mol_type = other DNA
gaggttggatttttggaaccacgttagataacaccactcaatccgcattgcttgtgaacaatggtagtgctattacaata

SEQ ID NO: 22215 - DNA, 80 bp, synthetic construct
  misc_feature 1..80: note = Synthetic: >JN183883_3-cand-200-279
  source 1..80: mol_type = other DNA
ttgcaactattacagtatcctataaagatggttctatgattacaactatgccaaaagcacagctgggttttcaagacatc

SEQ ID NO: 22216 - DNA, 80 bp, synthetic construct
  misc_feature 1..80: note = Synthetic: >KY073746_5-cand-0-79
  source 1..80: mol_type = other DNA
gtgtggagtgcgctgatacgacagttactgttagtggtgctgttgtttgcgctagcgtgttgcgtgacggttgtgacgcc

SEQ ID NO: 22217 - DNA, 80 bp, synthetic construct
  misc_feature 1..80: note = Synthetic: >MK472069_8-cand-100-179
  source 1..80: mol_type = other DNA
gtctcaactttgtttgtggcatccttagacttcttacactttttgtgtacgtacccttacttttgtatgtgggtgcgtac

SEQ ID NO: 22218 - DNA, 80 bp, synthetic construct
  misc_feature 1..80: note = Synthetic: >MH687965_2-cand-480-559
  source 1..80: mol_type = other DNA
tcattggttacagtgctgttactatgcctggtttgtacgacaatctttttcaagttggcgctgatggacacatacctgac

SEQ ID NO: 22219 - DNA, 80 bp, synthetic construct
  misc_feature 1..80: note = Synthetic: >HQ012371_3-cand-640-719
  source 1..80: mol_type = other DNA
tgtttcgatttgaacccatctgtggcaggttgtaagtggtcactcgttcatgacactacatggcgtacacaatttgccac

SEQ ID NO: 22220 - DNA, 80 bp, synthetic construct
  misc_feature 1..80: note = Synthetic: >KY073745_7-cand-540-619
  source 1..80: mol_type = other DNA
tggctatggcgcctgagcgtactggtgttgttttgcgtaagagtttgaagtacaacgttagggcttccattactgttgta

SEQ ID NO: 22221 - DNA, 80 bp, synthetic construct
  misc_feature 1..80: note = Synthetic: >KJ473816_1-cand-120-199
  source 1..80: mol_type = other DNA
tatttatgagggttatgaggctatttctatagttagaggattgcctgccgggttcaacgtcctcaaaccattattaaaga

SEQ ID NO: 22222 - DNA, 80 bp, synthetic construct
  misc_feature 1..80: note = Synthetic: >GQ504723_1-cand-0-79
  source 1..80: mol_type = other DNA
tgcctgtagtaggcagaggcatttttatagaagtaaatggtacctattatatcacaggacgtgatatgtatagcccacga

SEQ ID NO: 22223 - DNA, 80 bp, synthetic construct
  misc_feature 1..80: note = Synthetic: >JQ065048_16-cand-190-269
  source 1..80: mol_type = other DNA
aaaaacatttctttagctgactttgaaggtttgtttggtgtacaaccctatgctcgcgttataagggatcttattcgcga

SEQ ID NO: 22224 - DNA, 80 bp, synthetic construct
  misc_feature 1..80: note = Synthetic: >KJ473808_1-cand-0-79
  source 1..80: mol_type = other DNA
cttcaactaatattagtgaatggttttgttctggcactgtaggtagacctagtggtattgctaaaggtattggcattttt

SEQ ID NO: 22225 - DNA, 80 bp, synthetic construct
  misc_feature 1..80: note = Synthetic: >EF065516_4-cand-40-119
  source 1..80: mol_type = other DNA
ccgaaacaaaatgacacaacgcttatagaggaccagtgtgtcacttataatgtgtatggctatactggtactggtgtttt

SEQ ID NO: 22226 - DNA, 80 bp, synthetic construct
  misc_feature 1..80: note = Synthetic: >GQ504723_3-cand-790-869
  source 1..80: mol_type = other DNA
ttgatagaggttcttattatggtaagccaggtagtaggtgtaattttgggctagagtctattaatagaggccttagtttt

SEQ ID NO: 22227 - DNA, 80 bp, synthetic construct
  misc_feature 1..80: note = Synthetic: >MF577027_1-cand-40-119
  source 1..80: mol_type = other DNA
aaaactgacatggttacacactctggtgttcatggtgtctttcttaggtacaattcacacaaacagggatttcttgttgg

SEQ ID NO: 22228 - DNA, 80 bp, synthetic construct
  misc_feature 1..80: note = Synthetic: >MG916904_8-cand-220-299
  source 1..80: mol_type = other DNA
ttgaaggtggtcttagtgcatgtttagaggcttataagaaggacaataatttaactccgccaggtaaccttgtgtctttt

SEQ ID NO: 22229 - DNA, 80 bp, synthetic construct
  misc_feature 1..80: note = Synthetic: >KM454473_6-cand-190-269
  source 1..80: mol_type = other DNA
tttgttgtgcttgctatagctcttggtgtgacagtttggaaactcgtcaaacaggttttgtttaaagtggctggtctttt

SEQ ID NO: 22230 - DNA, 80 bp, synthetic construct
  misc_feature 1..80: note = Synthetic: >KJ473799_2-cand-30-109
  source 1..80: mol_type = other DNA
gcttcagcgttaaattgattaaaggttcattttcctatggcgatgtctatgttgacatatggtctggagaatgccctttt

SEQ ID NO: 22231 - DNA, 80 bp, synthetic construct
  misc_feature 1..80: note = Synthetic: >KJ473810_11-cand-700-779
  source 1..80: mol_type = other DNA
aaaagtgagtgtacaatttgagtgtgaacaaccgaaaggtttcactgaaccagattgtgacaatctcccaagtgtcgtta

SEQ ID NO: 22232 - DNA, 80 bp, synthetic construct
  misc_feature 1..80: note = Synthetic: >MH687970_4-cand-0-79
  source 1..80: mol_type = other DNA
ttgttgattccagatggaacaatgctcgtgtctctgataataaaacctctgaggcatgtcaattaccgttctgttatttt

SEQ ID NO: 22233 - DNA, 80 bp, synthetic construct
  misc_feature 1..80: note = Synthetic: >KU762338_17-cand-560-639
  source 1..80: mol_type = other DNA
agcatggctattggctccgcacacagcgtaattttaccaagggtggcaagtcgttgactgctaacccgcgctggtatttt

SEQ ID NO: 22234 - DNA, 80 bp, synthetic construct
  misc_feature 1..80: note = Synthetic: >JQ065046_8-cand-900-979
  source 1..80: mol_type = other DNA
actaccaactcaaacacatcagatttacaggctctattacagcagggatttcccttccttgtgatactgcttgctatttt

SEQ ID NO: 22235 - DNA, 80 bp, synthetic construct
  misc_feature 1..80: note = Synthetic: >KU762338_16-cand-1610-1689
  source 1..80: mol_type = other DNA
aaaataggtttgaggccttacctgttgatcaattgccagagcagactgtggaggtggtaaagaagcataaggttgcgact

SEQ ID NO: 22236 - DNA, 80 bp, synthetic construct
  misc_feature 1..80: note = Synthetic: >GU190215_6-cand-90-169
  source 1..80: mol_type = other DNA
aaaatcattgagtcttgtggtaattataaagtgaccaagggcaagtttaaacctggtgtctggaatattggcactagtaa

SEQ ID NO: 22237 - DNA, 80 bp, synthetic construct
  misc_feature 1..80: note = Synthetic: >KU762338_17-cand-160-239
  source 1..80: mol_type = other DNA
taagtacaaggttggcaatcatagagtccagaacgcccgcgaagacggggatacaatcgctatgtttatagcgtaatttt

SEQ ID NO: 22238 - DNA, 80 bp, synthetic construct
  misc_feature 1..80: note = Synthetic: >GCS_003_12-cand-550-629
  source 1..80: mol_type = other DNA
aaacaaacgtgttataccatggcgcagcattctcgtgcatgtgcttatgttgttagtggtgctaaaccctcaatggttta

SEQ ID NO: 22239 - DNA, 80 bp, synthetic construct
  misc_feature 1..80: note = Synthetic: >JQ065044_8-cand-0-79
  source 1..80: mol_type = other DNA
ctcagctgaagaccagtctgttttaattgagactggttgtgctaagggtaatctcaaaggcactaatgtaggtgttgttt

SEQ ID NO: 22240 - DNA, 80 bp, synthetic construct
  misc_feature 1..80: note = Synthetic: >GCS_019_10-cand-1000-1079
  source 1..80: mol_type = other DNA
tttaatgtgtgtttcaattttactgttttgtaggacttttgtttgctggattagccagctccctgttctcaaccttgttt

SEQ ID NO: 22241 - DNA, 80 bp, synthetic construct
  misc_feature 1..80: note = Synthetic: >MF577027_2-cand-0-79
  source 1..80: mol_type = other DNA
aaacacccttagatgctctcaactgagttttgatttgagtgacggtttttacccgattactcagttacagagcgaattgc

SEQ ID NO: 22242 - DNA, 80 bp, synthetic construct
  misc_feature 1..80: note = Synthetic: >MG916904_11-cand-0-79
  source 1..80: mol_type = other DNA
caatgcacatgctaatactatgttggcatcttttgagcctgtctttgacgaatttaaacaattcactatgcctgctgttt

SEQ ID NO: 22243 - DNA, 80 bp, synthetic construct
  misc_feature 1..80: note = Synthetic: >KY073744_5-cand-220-299
  source 1..80: mol_type = other DNA
ttgtcaaactcagttcgtggttcgcttggtgatagtggtgaacttcttaacaagcttcttaaagacaagttcacatgttt

SEQ ID NO: 22244 - DNA, 80 bp, synthetic construct
  misc_feature 1..80: note = Synthetic: >MG916901_11-cand-0-79
  source 1..80: mol_type = other DNA
ctactttgccttacacaaagcttctacgttacgccgcaactatgtcatgctgtgtcttagaattttagtgttgttggttt

SEQ ID NO: 22245 - DNA, 80 bp, synthetic construct
  misc_feature 1..80: note = Synthetic: >KY073745_10-cand-1520-1599
  source 1..80: mol_type = other DNA
ttctgttaactcttgcaattgtgcttgagttcttcattcttgaggagctcccttttgctctatttcttgcagaatggttt

SEQ ID NO: 22246 - DNA, 80 bp, synthetic construct
  misc_feature 1..80: note = Synthetic: >MG916903_10-cand-390-469
  source 1..80: mol_type = other DNA
aaaccccaaacactggcgtgtttgaccctagcacttttgtagaggatgtttgcactgattacactatctatggtatgtcc

SEQ ID NO: 22247 - DNA, 80 bp, synthetic construct
  misc_feature 1..80: note = Synthetic: >MK472069_12-cand-2160-2239
  source 1..80: mol_type = other DNA
aaacccgcggaagaagttccatgtgaggaattgtcagatgttgctgaggttaacaaggctttggatttcatcgtggaaaa

SEQ ID NO: 22248 - DNA, 80 bp, synthetic construct
  misc_feature 1..80: note = Synthetic: >HM245926_8-cand-560-639
  source 1..80: mol_type = other DNA
cagaattgcacaggtaattgtgaagaatacgcaaacaacatatttagcacagaacctggtggtattatacctgagggttt

SEQ ID NO: 22249 - DNA, 80 bp, synthetic construct
  misc_feature 1..80: note = Synthetic: >MG893511_3-cand-1140-1219
  source 1..80: mol_type = other DNA
atattgccaccaacagtgcgagagtttgcattcggcagagatggatccgtctttgttaacggttataaatattttagttt

SEQ ID NO: 22250 - DNA, 80 bp, synthetic construct
  misc_feature 1..80: note = Synthetic: >FJ938051_3-cand-0-79
  source 1..80: mol_type = other DNA
aaactattctaggaggttatctaccatattgcggagtaggtattaattgtggttggtacaattttgtctacagtcagcgc

SEQ ID NO: 22251 - DNA, 80 bp, synthetic construct
  misc_feature 1..80: note = Synthetic: >FJ938051_2-cand-20-99
  source 1..80: mol_type = other DNA
ctagcctacaagggttgtatacttattctaatttggtggagttacaaaactacgactgcccgttctcgccacaccagttt

SEQ ID NO: 22252 - DNA, 80 bp, synthetic construct
  misc_feature 1..80: note = Synthetic: >MK472069_10-cand-840-919
  source 1..80: mol_type = other DNA
taagcttcgtgaagtgagcagtgcaccattttctcccattgtaaccggtaatgttacggttcctgttaattacacagttt

SEQ ID NO: 22253 - DNA, 80 bp, synthetic construct
  misc_feature 1..80: note = Synthetic: >MK472069_8-cand-410-489
  source 1..80: mol_type = other DNA
atttatcaccgtacgtgggagaaaatcactaatcgccgaactcgttaggagggtagagctgattaatggtgattttcttt

SEQ ID NO: 22254 - DNA, 80 bp, synthetic construct
  misc_feature 1..80: note = Synthetic: >KU762338_16-cand-2100-2179
  source 1..80: mol_type = other DNA
aaagaaaccaccactagtcaaagtgtctggtattgttgcttacaacacagggtgtagtgttacggcttgtgtctttaatt

SEQ ID NO: 22255 - DNA, 80 bp, synthetic construct
  misc_feature 1..80: note = Synthetic: >KJ473810_11-cand-260-339
  source 1..80: mol_type = other DNA
aaagaaggtattgagttcgcggctgaagtaccatcatgttttgaaagttgtttttcagttttcaaagaatttgttactgg

SEQ ID NO: 22256 - DNA, 80 bp, synthetic construct
  misc_feature 1..80: note = Synthetic: >MK472068_9-cand-800-879
  source 1..80: mol_type = other DNA
tgaggacgaggttgagatcgtggatgatgtaatagatgatgaaacttctgcttaatcaactatgaaattccagattcttt

SEQ ID NO: 22257 - DNA, 80 bp, synthetic construct
  misc_feature 1..80: note = Synthetic: >FJ376621_10-cand-30-109
  source 1..80: mol_type = other DNA
tgttcaagaaccacaaccagattgtgtttatctggctgttgatgatgtagtacagacaaaagctaaagaccttggtcttt

SEQ ID NO: 22258 - DNA, 80 bp, synthetic construct
  misc_feature 1..80: note = Synthetic: >GCS_003_16-cand-1530-1609
  source 1..80: mol_type = other DNA
ccggatgtctaagtcgcactaacgttggcccaacgttagctgtcaaaatgggtgattgtaacggtatgtggtccatcttt

SEQ ID NO: 22259 - DNA, 80 bp, synthetic construct
  misc_feature 1..80: note = Synthetic: >FJ376621_8-cand-20-99
  source 1..80: mol_type = other DNA
aaagcaattcctggtgttccggttttaaaccccaagacatcacttactgagtttgaacaactgtttggagctcaacctgt

SEQ ID NO: 22260 - DNA, 80 bp, synthetic construct
  misc_feature 1..80: note = Synthetic: >DQ412043_2-cand-100-179
  source 1..80: mol_type = other DNA
aaagcacttgaaatgtgcattgaccaagtcataatcgctggtgccaagctgagaacactcaacttgggcgaggtcttcat

SEQ ID NO: 22261 - DNA, 80 bp, synthetic construct
  misc_feature 1..80: note = Synthetic: >GQ504723_2-cand-220-299
  source 1..80: mol_type = other DNA
gggttacttgtattacctcccattataactgcggaaatgcaaactttgtatactagttctctagtagtctcaatggcttt

SEQ ID NO: 22262 - DNA, 80 bp, synthetic construct
  misc_feature 1..80: note = Synthetic: >GQ504722_2-cand-220-299
  source 1..80: mol_type = other DNA
gggttacttgtattacctccaattataactgcggaaatgcaagcaatgtatactagttctctagtagcctcaatggcttt

SEQ ID NO: 22263 - DNA, 80 bp, synthetic construct
  misc_feature 1..80: note = Synthetic: >KU762338_16-cand-1530-1609
  source 1..80: mol_type = other DNA
aaagcccgtgctgtatccaaagaaaccaaagacctggaagaaactagtgcctttgttgtcagtactagaggtaaaaacca

SEQ ID NO: 22264 - DNA, 80 bp, synthetic construct
  misc_feature 1..80: note = Synthetic: >KJ473810_8-cand-0-79
  source 1..80: mol_type = other DNA
aaagcctcttgcttcagaacaaattgtgcactttttgccttgcgcatttgcactttgctgttatacacaccaattttggt

SEQ ID NO: 22265 - DNA, 80 bp, synthetic construct
  misc_feature 1..80: note = Synthetic: >KX512809_15-cand-720-799
  source 1..80: mol_type = other DNA
acacctcgacagttactagtggcaagtttgtttcgagtcagcctctacttgttaattgtttaacacctgtgcctagcttt

SEQ ID NO: 22266 - DNA, 80 bp, synthetic construct
  misc_feature 1..80: note = Synthetic: >GCS_003_13-cand-220-299
  source 1..80: mol_type = other DNA
aatgtctcgcttttgagctcaagccttgtgctgaaggctcttgcagagaatctgttagattctgttaaaaacactccttt

SEQ ID NO: 22267 - DNA, 80 bp, synthetic construct
  misc_feature 1..80: note = Synthetic: >KX512809_9-cand-360-439
  source 1..80: mol_type = other DNA
aagtttttaccacgtaagagcaaagacaagatgcttgttgttggttgtagtttcaatgaccctcttctagacttgccttt

SEQ ID NO: 22268 - DNA, 80 bp, synthetic construct
  misc_feature 1..80: note = Synthetic: >MK472070_6-cand-40-119
  source 1..80: mol_type = other DNA
aaaggcaattgttgttgtcttgtagcccgtgtgcttacgttagtgttttatgcgccattgttgttcttttgtggcgctta

SEQ ID NO: 22269 - DNA, 80 bp, synthetic construct
  misc_feature 1..80: note = Synthetic: >GCS_003_15-cand-80-159
  source 1..80: mol_type = other DNA
aaaggctgggatgtagtgcagactgtttgtaaggtagacggagtcacctacaaaactatttgcaaatacagggacactta

SEQ ID NO: 22270 - DNA, 80 bp, synthetic construct
  misc_feature 1..80: note = Synthetic: >KJ473807_9-cand-220-299
  source 1..80: mol_type = other DNA
aaaggtgtgctttactttcgtgtttgtaaatacgcaggtaaatatacacctgtgggcaatccagacaagacagttagcaa

SEQ ID NO: 22271 - DNA, 80 bp, synthetic construct
  misc_feature 1..80: note = Synthetic: >MK472067_14-cand-980-1059
  source 1..80: mol_type = other DNA
cgctgttgaaaatgcactgttgtctcccctggaaatttgtcaaattttgcatcctgattttctttattgctgttttattt

SEQ ID NO: 22272 - DNA, 80 bp, synthetic construct
  misc_feature 1..80: note = Synthetic: >MH938450_10-cand-0-79
  source 1..80: mol_type = other DNA
gatgtgccacatgcagtgccaatttatcactttaatttgggtgttgattatttacttagtagtgtctttgtctactattt

SEQ ID NO: 22273 - DNA, 80 bp, synthetic construct
  misc_feature 1..80: note = Synthetic: >EF065516_5-cand-30-109
  source 1..80: mol_type = other DNA
gcctgatccttatatagcatattctggccagacagtacgacaaactttgtttgttgcaaatgctacggacactactattt

SEQ ID NO: 22274 - DNA, 80 bp, synthetic construct
  misc_feature 1..80: note = Synthetic: >KJ473821_6-cand-30-109
  source 1..80: mol_type = other DNA
actatgttcttttcaacacaccctgtagagtgtgatgatgagaatgaggaagagcctgcagatgatgatgcggaggattt

SEQ ID NO: 22275 - DNA, 80 bp, synthetic construct
  misc_feature 1..80: note = Synthetic: >MG916904_14-cand-1080-1159
  source 1..80: mol_type = other DNA
attcgagttcttttgcactaatgatacgagtgttaaccctacttataggtatgtcccttttggacaacttacagagattt

SEQ ID NO: 22276 - DNA, 80 bp, synthetic construct
  misc_feature 1..80: note = Synthetic: >FJ938056_2-cand-300-379
  source 1..80: mol_type = other DNA
aaatctgccattggcaaccaggcaacataagttcataccatcaatttaatcttaatctaggagatggtggtcaatgcgtg

SEQ ID NO: 22277 - DNA, 80 bp, synthetic construct
  misc_feature 1..80: note = Synthetic: >KJ473810_4-cand-0-79
  source 1..80: mol_type = other DNA
agacacaagaaactacatattgtcgtgtgggtcagtgtgttaactctaaggctggtgtgtgctttggcgctaacagattt

SEQ ID NO: 22278 - DNA, 80 bp, synthetic construct
  misc_feature 1..80: note = Synthetic: >EF065513_2-cand-240-319
  source 1..80: mol_type = other DNA
atttgaattctacagctccttatgccgtagcgaataggtttcctattaaacctgggggccgccagagtaatagtgcattt

SEQ ID NO: 22279 - DNA, 80 bp, synthetic construct
  misc_feature 1..80: note = Synthetic: >KY073746_8-cand-270-349
  source 1..80: mol_type = other DNA
aggttgcacctgttagtgaacctgctgatgttgttgacgacgttgttgtccaaaagtcaagtgttgacattcagccattt

SEQ ID NO: 22280 - DNA, 80 bp, synthetic construct
  misc_feature 1..80: note = Synthetic: >MG596803_3-cand-230-309
  source 1..80: mol_type = other DNA
aatgttatttcacccagtactaatactgttattaaaaagatttaccctgcgttcatgcttggaatgtcagttggtaattt

SEQ ID NO: 22281 - DNA, 80 bp, synthetic construct
  misc_feature 1..80: note = Synthetic: >MK720944_10-cand-1400-1479
  source 1..80: mol_type = other DNA
ggtaacacaaagatcgcttgacgagcctaacatgttagttaactaatgtagtcgtgaattgccgacacatcttaaaattt

SEQ ID NO: 22282 - DNA, 80 bp, synthetic construct
  misc_feature 1..80: note = Synthetic: >MH938450_10-cand-90-169
  source 1..80: mol_type = other DNA
cgcggcaattcttttaaagttaacattgcctgttttattgccaggttggttgtattattaggctatgcaccacttttgtt

SEQ ID NO: 22283 - DNA, 80 bp, synthetic construct
  misc_feature 1..80: note = Synthetic: >PDF_0663_4-cand-180-259
  source 1..80: mol_type = other DNA
ctgttgcctcaccaagcaatgtctcgtactacaaaatgcagtacaggtacaaaattggtgtcgattctggagttgttgtt

SEQ ID NO: 22284 - DNA, 80 bp, synthetic construct
  misc_feature 1..80: note = Synthetic: >MH938450_13-cand-1070-1149
  source 1..80: mol_type = other DNA
taacacaaggcaatgacactcaatactctaatcgtacatttgttggagtaatgccagcagatgtcagagagttggttgtt

SEQ ID NO: 22285 - DNA, 80 bp, synthetic construct
  misc_feature 1..80: note = Synthetic: >MN611522_1-cand-0-79
  source 1..80: mol_type = other DNA
tatggtatttttcactgtatagaccagctagtagtcgtgggcgtgtcgcagtatttgtggctaagttacttgtgcttgtt

SEQ ID NO: 22286 - DNA, 80 bp, synthetic construct
  misc_feature 1..80: note = Synthetic: >KJ473810_10-cand-430-509
  source 1..80: mol_type = other DNA
aacaagtggaactttgttgctgttaagtgtcttgttaaagagacttgtgcattctttgcagcacataaaatggtcacatt

SEQ ID NO: 22287 - DNA, 80 bp, synthetic construct
  misc_feature 1..80: note = Synthetic: >FJ376619_11-cand-450-529
  source 1..80: mol_type = other DNA
tgtttgtagtgattcacaagacttctctagggctcataacagtcctttacttaaatcgcgcaatgcacagttgtattgtt

SEQ ID NO: 22288 - DNA, 80 bp, synthetic construct
  misc_feature 1..80: note = Synthetic: >MK492263_4-cand-10-89
  source 1..80: mol_type = other DNA
agttttagcagttattatgctactttgcatgacaaactgctgttcttgcttcaaaggactttgttcttgtagacattgtt

SEQ ID NO: 22289 - DNA, 80 bp, synthetic construct
  misc_feature 1..80: note = Synthetic: >KX512809_5-cand-210-289
  source 1..80: mol_type = other DNA
aacacaacacaattggtggcatttatatggatggtttgaaggatttacttcctcgcaggaaatgtactaacaaacatggc

SEQ ID NO: 22290 - DNA, 80 bp, synthetic construct
  misc_feature 1..80: note = Synthetic: >GQ504723_3-cand-1060-1139
  source 1..80: mol_type = other DNA
atggttcaagaattagaactgccacatcccctcctgtttatagtaataataatgttaatattaatttgggtttgtgtgtt

SEQ ID NO: 22291 - DNA, 80 bp, synthetic construct
  misc_feature 1..80: note = Synthetic: >FJ376620_9-cand-590-669
  source 1..80: mol_type = other DNA
aacacatgctttagcaattgtattacttttagcaaacaccactttagtccttctgactttagtagcttgcttcttgttta

SEQ ID NO: 22292 - DNA, 80 bp, synthetic construct
  misc_feature 1..80: note = Synthetic: >JQ065048_8-cand-130-209
  source 1..80: mol_type = other DNA
aacacgtgtttctgttttaaggtgtttggctactattgtaaaattgcatgctaattggggtgatgcctctatattaggct

SEQ ID NO: 22293 - DNA, 80 bp, synthetic construct
  misc_feature 1..80: note = Synthetic: >PDF_3316_11-cand-770-849
  source 1..80: mol_type = other DNA
aacacttgcccagggcttatttgagctttctaatactattgttgatgtcacacaagacatcttcaagctcgtgccttggt

SEQ ID NO: 22294 - DNA, 80 bp, synthetic construct
  misc_feature 1..80: note = Synthetic: >KY073746_4-cand-330-409
  source 1..80: mol_type = other DNA
acgctaaccaaaacttgctggctatttctgagatcttgtatctgtccaaggaaccacatacattgcttccagggtctgtt

SEQ ID NO: 22295 - DNA, 80 bp, synthetic construct
  misc_feature 1..80: note = Synthetic: >KY073746_5-cand-240-319
  source 1..80: mol_type = other DNA
acactgtctttgactcacgtggtaaatccatgtatgacggcgaccggtatttggcacatgatttgtccactcttgctgtt

SEQ ID NO: 22296 - DNA, 80 bp, synthetic construct
  misc_feature 1..80: note = Synthetic: >GCS_019_12-cand-830-909
  source 1..80: mol_type = other DNA
ctgcactcaaaaacttgcctgtcactagcgcacaacttgtcagattcctgaaggccgttggttctgcagctattgctgtt

SEQ ID NO: 22297 - DNA, 80 bp, synthetic construct
  misc_feature 1..80: note = Synthetic: >EU186072_4-cand-200-279
  source 1..80: mol_type = other DNA
ccatttatggcacctcgtattacagtctactaatggttttacaagacaaagtagaggaaaaccaaccccatgtggctgtt

SEQ ID NO: 22298 - DNA, 80 bp, synthetic construct
  misc_feature 1..80: note = Synthetic: >MK720944_7-cand-490-569
  source 1..80: mol_type = other DNA
cagagaattcacgtgattttcagagggttgtacttgactctaaaaagacttttaatgatcaacttggtgtttgtactgtt

SEQ ID NO: 22299 - DNA, 80 bp, synthetic construct
  misc_feature 1..80: note = Synthetic: >KY073745_4-cand-0-79
  source 1..80: mol_type = other DNA
attgggcctgtatagcgagtatggacaatgaagccaggttgttccacaatgattcacatgggttctttatacgttatgtt

SEQ ID NO: 22300 - DNA, 80 bp, synthetic construct
  misc_feature 1..80: note = Synthetic: >GCS_242_3-cand-520-599
  source 1..80: mol_type = other DNA
tttgccgtgctgttgcatggtgtttagctagattgtctgaagactttgatgttcctgatgaaacacccttcatctatgtt

SEQ ID NO: 22301 - DNA, 80 bp, synthetic construct
  misc_feature 1..80: note = Synthetic: >EU186072_5-cand-10-89
  source 1..80: mol_type = other DNA
aacatttgtaactatgccacagttctacaattggatgcatattacgctacatgtcgtgttgaacgacactgcgaagaaag

SEQ ID NO: 22302 - DNA, 80 bp, synthetic construct
  misc_feature 1..80: note = Synthetic: >JQ065048_15-cand-1040-1119
  source 1..80: mol_type = other DNA
tagatggacacaacactagatttgttatttggcatgatgatgtagttcgtacctgttatcctgtgttgcagtccttggtt

SEQ ID NO: 22303 - DNA, 80 bp, synthetic construct
  misc_feature 1..80: note = Synthetic: >GCS_003_15-cand-2180-2259
  source 1..80: mol_type = other DNA
aattatctgaaggcgcgattcagtaatacttcatggactggtattagcagagtacttagattactcttatacatgtggtt

SEQ ID NO: 22304 - DNA, 80 bp, synthetic construct
  misc_feature 1..80: note = Synthetic: >GCS_019_12-cand-670-749
  source 1..80: mol_type = other DNA
aaccagccctctgatgcagtcaagaatgccgtttgctctggtgtcattgatatcagtgctggttactttggcctttatga

SEQ ID NO: 22305 - DNA, 80 bp, synthetic construct
  misc_feature 1..80: note = Synthetic: >MK472069_11-cand-180-259
  source 1..80: mol_type = other DNA
gcggccaacgtggtcagtctcgaggtcgatcccaatcgcggggtcgtaactctaatgggcagacacaacaagacctggtt

SEQ ID NO: 22306 - DNA, 80 bp, synthetic construct
  misc_feature 1..80: note = Synthetic: >GCS_019_9-cand-720-799
  source 1..80: mol_type = other DNA
aaccagtttataaagtgtatatgctttatcaggattttatgcgaatacaacccgttccttctgagatcatagatgtctaa

SEQ ID NO: 22307 - DNA, 80 bp, synthetic construct
  misc_feature 1..80: note = Synthetic: >EU111742_1-cand-120-199
  source 1..80: mol_type = other DNA
gttgggcgagttaggggatattgattatttcccttttaactgtaccaacgttactaatgagtttcgtactaattatggtt

SEQ ID NO: 22308 - DNA, 80 bp, synthetic construct
  misc_feature 1..80: note = Synthetic: >DQ648857_2-cand-30-109
  source 1..80: mol_type = other DNA
aagttttcaacttgacactgctcctaaaactggaaactttaaagacctacgtgagtatgtctttaagaatagggatggtt

SEQ ID NO: 22309 - DNA, 80 bp, synthetic construct
  misc_feature 1..80: note = Synthetic: >FJ376620_10-cand-90-169
  source 1..80: mol_type = other DNA
aggtgaccttggacagctaaagtccaggatcaactctaactatttaagagacactcgtttgacatctcttaaacagggtt

SEQ ID NO: 22310 - DNA, 80 bp, synthetic construct
  misc_feature 1..80: note = Synthetic: >GCS_003_9-cand-90-169
  source 1..80: mol_type = other DNA
aaccgcattgtaagtctaggcgcccaatgccttgtgctcgcaactggacttgtgtgttttattgagagattagcgctagc

SEQ ID NO: 22311 - DNA, 80 bp, synthetic construct
  misc_feature 1..80: note = Synthetic: >MG021452_5-cand-0-79
  source 1..80: mol_type = other DNA
aaccgtgatggtgatgtgcagtggagctctacaatgatcttttctgttcaccccgttgagtgtgatgaatatgaagaaga

SEQ ID NO: 22312 - DNA, 80 bp, synthetic construct
  misc_feature 1..80: note = Synthetic: >MH938450_10-cand-360-439
  source 1..80: mol_type = other DNA
gattcttatataaaatttgggccacattttgttccatttatcaatgacaatggtgtttatttagcagtccgtggtaggtt

SEQ ID NO: 22313 - DNA, 80 bp, synthetic construct
  misc_feature 1..80: note = Synthetic: >KU762338_16-cand-560-639
  source 1..80: mol_type = other DNA
acggtagagtgcttttggctcagcgtgattccaattgctacttgaatgcggcaatctctgtgttgcaagacattgaggtt

SEQ ID NO: 22314 - DNA, 80 bp, synthetic construct
  misc_feature 1..80: note = Synthetic: >JQ065048_9-cand-330-409
  source 1..80: mol_type = other DNA
atgtattttaacctcaccaataacacaggtagatgtgacgggaattcggaaaaggttggtcttgtggatgccatcaggtt

SEQ ID NO: 22315 - DNA, 80 bp, synthetic construct
  misc_feature 1..80: note = Synthetic: >KU973692_2-cand-480-559
  source 1..80: mol_type = other DNA
aacgcagttcttgcctttaaagcccctatggaaactgccccttggtctaaatattactagttataaggttgttacaactt

SEQ ID NO: 22316 - DNA, 80 bp, synthetic construct
  misc_feature 1..80: note = Synthetic: >MH938448_4-cand-420-499
  source 1..80: mol_type = other DNA
ctattttctgtcaaaaacctggtcctgctaaagacatgtacgttaaaccgtactgtgcagcttcttttactggtagcgtt

SEQ ID NO: 22317 - DNA, 80 bp, synthetic construct
  misc_feature 1..80: note = Synthetic: >GCS_003_16-cand-2120-2199
  source 1..80: mol_type = other DNA
gtggtctggagcaggttgaattctatgacactgtatctgtgcgagggcagcatgtcattcgctttggttttaccagcgtt

SEQ ID NO: 22318 - DNA, 80 bp, synthetic construct
  misc_feature 1..80: note = Synthetic: >GCS_003_15-cand-480-559
  source 1..80: mol_type = other DNA
actacggtgtgaatgattgcaccgtggtagcacgcgctctcagtgtacggaggtatgtgcgaacctggccatattccgtt

SEQ ID NO: 22319 - DNA, 80 bp, synthetic construct
  misc_feature 1..80: note = Synthetic: >MG916902_9-cand-580-659
  source 1..80: mol_type = other DNA
cttttgagtttgttaagtctattgaaacacctaacttttattacttgaccaatgctacagctaattgcacatcgcccgtt

SEQ ID NO: 22320 - DNA, 80 bp, synthetic construct
  misc_feature 1..80: note = Synthetic: >GCS_003_15-cand-1440-1519
  source 1..80: mol_type = other DNA
aacgtaacctgaccgtttacccagactgttctggtgacgcagttgtggtaaacgaagaaattccgtcctatgcgcatggt

SEQ ID NO: 22321 - DNA, 80 bp, synthetic construct
  misc_feature 1..80: note = Synthetic: >MH938449_13-cand-530-609
  source 1..80: mol_type = other DNA
atgacatcgaaatcacctacgtgtacaagatgcgtgtaccaaaatctaatcgatctttggtgcgcttcctgccacacgtt

SEQ ID NO: 22322 - DNA, 80 bp, synthetic construct
  misc_feature 1..80: note = Synthetic: >KF636752_10-cand-0-79
  source 1..80: mol_type = other DNA
aacgttggtttattgttccacaaacttgtgctttaacagacttcaatacagccgtcttgaagtacgggtatcaaagtctt

SEQ ID NO: 22323 - DNA, 80 bp, synthetic construct
  misc_feature 1..80: note = Synthetic: >KJ473810_11-cand-970-1049
  source 1..80: mol_type = other DNA
tcaaacacatgcagttgactctcttgtagctttcaaaccagcttttgctgaatttgaacagtttttagagcctgttagtt

SEQ ID NO: 22324 - DNA, 80 bp, synthetic construct
  misc_feature 1..80: note = Synthetic: >MH938448_2-cand-30-109
  source 1..80: mol_type = other DNA
gagtgactattgtgacaatatgatttgcaagatttgtctctatggctaccaagaactcagagatttcccacagcttagtt

SEQ ID NO: 22325 - DNA, 80 bp, synthetic construct
  misc_feature 1..80: note = Synthetic: >HQ012370_3-cand-460-539
  source 1..80: mol_type = other DNA
ttaacagcacaagcagccgtgattaacgatgagatagtgggtgttataacatctgttaatcaaactgatctgtttgagtt

SEQ ID NO: 22326 - DNA, 80 bp, synthetic construct
  misc_feature 1..80: note = Synthetic: >KU762338_15-cand-640-719
  source 1..80: mol_type = other DNA
acacctcgccaacagcgtatggaggttgaggtacttgatggtaagtatgatgcaccagttgctattactgttcctgagtt

SEQ ID NO: 22327 - DNA, 80 bp, synthetic construct
  misc_feature 1..80: note = Synthetic: >KU762338_16-cand-400-479
  source 1..80: mol_type = other DNA
aactccgatgatgccaacatacaattgtttaagcaagacaacttttctccagaagaagtacaggccataagcgactacta

SEQ ID NO: 22328 - DNA, 80 bp, synthetic construct
  misc_feature 1..80: note = Synthetic: >PDF_2560_7-cand-450-529
  source 1..80: mol_type = other DNA
ttaagcataactaccaacaaccttttgttggttattgctttgttcctcctaaagtgtggtgtcgtagtcaaggtagagtt

SEQ ID NO: 22329 - DNA, 80 bp, synthetic construct
  misc_feature 1..80: note = Synthetic: >MF593268_3-cand-1440-1519
  source 1..80: mol_type = other DNA
aactctcctacaactggtcaactttgggcttataattttggtggcgttccttacagagtgtcacgtcttacttatacgga

SEQ ID NO: 22330 - DNA, 80 bp, synthetic construct
  misc_feature 1..80: note = Synthetic: >MH938450_11-cand-620-699
  source 1..80: mol_type = other DNA
ctgatgacactcaggatgtcacacttgacccttctgctcctcctttcacacccagaccacaacgcacacctagatcagtt

SEQ ID NO: 22331 - DNA, 80 bp, synthetic construct
  misc_feature 1..80: note = Synthetic: >MH938450_10-cand-720-799
  source 1..80: mol_type = other DNA
gttttcttattaatctttgttttaatactttgtatcacttttattaagctcgtacaactttgcttcacttgtcaccagtt

SEQ ID NO: 22332 - DNA, 80 bp, synthetic construct
  misc_feature 1..80: note = Synthetic: >GCS_003_15-cand-1040-1119
  source 1..80: mol_type = other DNA
aactggttttcagcagtagtgtttaaaggacccgttacctgcggccattacatgtacgcagttaacggcagtttgatctc

SEQ ID NO: 22333 - DNA, 80 bp, synthetic construct
  misc_feature 1..80: note = Synthetic: >MH817484_4-cand-370-449
  source 1..80: mol_type = other DNA
aacttaccaccaatcaagagtgttaacttctctattagttcagttgagcagtatggtttctggacaatcgcttacaccaa

SEQ ID NO: 22334 - DNA, 80 bp, synthetic construct
  misc_feature 1..80: note = Synthetic: >GQ504723_3-cand-340-419
  source 1..80: mol_type = other DNA
ttttcttaaatggcaacctcctttatacttctaattatacagaagatgttaaagcagcaggtgtctatgcaaagcaagtt

SEQ ID NO: 22335 - DNA, 80 bp, synthetic construct
  misc_feature 1..80: note = Synthetic: >MN611525_6-cand-220-299
  source 1..80: mol_type = other DNA
aacttggttgtagtccctgatgaacttgttgttacagaaggtgtcaccaaatccattggtggtagagcattcttttatag

SEQ ID NO: 22336 - DNA, 80 bp, synthetic construct
  misc_feature 1..80: note = Synthetic: >MG893511_2-cand-120-199
  source 1..80: mol_type = other DNA
aactttgtgttttgatgtgaacccatctgttgcaggttgtaagtggtcgttattacatgattctatttggcacacacagt

SEQ ID NO: 22337 - DNA, 80 bp, synthetic construct
  misc_feature 1..80: note = Synthetic: >GCS_019_9-cand-810-889
  source 1..80: mol_type = other DNA
atgtctgatggtaaaaattttactagtgaagaggtgtataatcacctcgtaaactggaactttgcctggaatattttctt

SEQ ID NO: 22338 - DNA, 80 bp, synthetic construct
  misc_feature 1..80: note = Synthetic: >FJ376619_12-cand-320-399
  source 1..80: mol_type = other DNA
ttgccattgattgtgccattgaggttgcatacagtggtaagactgaacaacattttgctgacgctaaaagtgttgttctt

SEQ ID NO: 22339 - DNA, 80 bp, synthetic construct
  misc_feature 1..80: note = Synthetic: >MF593268_3-cand-230-309
  source 1..80: mol_type = other DNA
taagactggcagtgtaattgtaggacaagcacagactactatgaaaaagatttaccctgcacttatgttgggtagttctt

SEQ ID NO: 22340 - DNA, 80 bp, synthetic construct
  misc_feature 1..80: note = Synthetic: >MH938450_9-cand-0-79
  source 1..80: mol_type = other DNA
aagacctgcacttaagcctagtgtgtttgcttatgaattttatgactttgatggtcttaaagttcttaagcaggacagca

SEQ ID NO: 22341 - DNA, 80 bp, synthetic construct
  misc_feature 1..80: note = Synthetic: >HQ012368_2-cand-890-969
  source 1..80: mol_type = other DNA
gacattgccttaacttgttaacgcaatacacttcggcttgtcagacaattgaaaatgcccttaaccttggtgcacgtctt

SEQ ID NO: 22342 - DNA, 80 bp, synthetic construct
  misc_feature 1..80: note = Synthetic: >KY073745_10-cand-840-919
  source 1..80: mol_type = other DNA
ttctgaagttgccaaaaatgccgtcgacccgctcaatgagctgaaggtcgaaatggtagatgaggttaagtatgagtctt

SEQ ID NO: 22343 - DNA, 80 bp, synthetic construct
  misc_feature 1..80: note = Synthetic: >KY073744_8-cand-850-929
  source 1..80: mol_type = other DNA
aagagactagttttgttgaaccaaaagagggtggtcagtttgtcgtttctgatgactatttctggtacattatggatgac

SEQ ID NO: 22344 - DNA, 80 bp, synthetic construct
  misc_feature 1..80: note = Synthetic: >KJ473821_4-cand-250-329
  source 1..80: mol_type = other DNA
atatgcttgatgatgttcagaagtggctgcaaccttatggtgctaagcctattactgagtatcatattacacttgctctt

SEQ ID NO: 22345 - DNA, 80 bp, synthetic construct
  misc_feature 1..80: note = Synthetic: >FJ376619_12-cand-1130-1209
  source 1..80: mol_type = other DNA
tgcagtctttggcagataactttaaaccactttttgtagctgttgaagctgttatagctcagctgcagaacattactctt

SEQ ID NO: 22346 - DNA, 80 bp, synthetic construct
  misc_feature 1..80: note = Synthetic: >MH938450_8-cand-120-199
  source 1..80: mol_type = other DNA
aagagttcgggaaaagtgcctgctggtaacctcgttacgttaagaagtgaggtcagtggtgctcctttagtcacttttgc

SEQ ID NO: 22347 - DNA, 80 bp, synthetic construct
  misc_feature 1..80: note = Synthetic: >MN611522_2-cand-370-449
  source 1..80: mol_type = other DNA
tatttaacgctgcttacctccctaatgatactatgattaattgttctacgcctttgggtgctggcttttgcgctgatctt

SEQ ID NO: 22348 - DNA, 80 bp, synthetic construct
  misc_feature 1..80: note = Synthetic: >FJ376620_8-cand-660-739
  source 1..80: mol_type = other DNA
ttgacaactctgttttggttaacccagctaacccacagcttactaatggtggaggggctgctaaagccattgcagatctt

SEQ ID NO: 22349 - DNA, 80 bp, synthetic construct
  misc_feature 1..80: note = Synthetic: >GCS_003_7-cand-190-269
  source 1..80: mol_type = other DNA
tatttgcactcagacatttaatggcatctcagtgttaccacccattgtgtcacctggcatgcaagccttgtatacatctt

SEQ ID NO: 22350 - DNA, 80 bp, synthetic construct
  misc_feature 1..80: note = Synthetic: >MK472069_5-cand-20-99
  source 1..80: mol_type = other DNA
aagattgctaagtaccttgtctctaccacaacgtttgttgttgaaaagcagacagaaacaggttgttgtgatgagcgtca

SEQ ID NO: 22351 - DNA, 80 bp, synthetic construct
  misc_feature 1..80: note = Synthetic: >KY417145_2-cand-270-349
  source 1..80: mol_type = other DNA
aagcactgctatttataccaacttacgtaactgtacgtatgtggacacactacgtgacctaccattaagtctcacagagg

SEQ ID NO: 22352 - DNA, 80 bp, synthetic construct
  misc_feature 1..80: note = Synthetic: >MK492263_8-cand-900-979
  source 1..80: mol_type = other DNA
atgaagatgtgcacatagtaccgaatgccgtaactgtaaattttatctatgacatttgcgaaggacttaatgaagtgctt

SEQ ID NO: 22353 - DNA, 80 bp, synthetic construct
  misc_feature 1..80: note = Synthetic: >GCS_003_13-cand-560-639
  source 1..80: mol_type = other DNA
atggtgattaccatttcttctcagcaaagggcgtgctaacagaagtacaagtttgtgctaagacacttggtgccatgctt

SEQ ID NO: 22354 - DNA, 80 bp, synthetic construct
  misc_feature 1..80: note = Synthetic: >PDF_0663_5-cand-0-79
  source 1..80: mol_type = other DNA
aagccatgctggtacagacctcgaaggcaagttttatggtgactttatagataagcagatagctcaatctgcacatgctg

SEQ ID NO: 22355 - DNA, 80 bp, synthetic construct
  misc_feature 1..80: note = Synthetic: >EF065513_3-cand-110-189
  source 1..80: mol_type = other DNA
gggctttgtttagctaacaagattatgttgggtgacaagccacttcctacagatgaattccatccctttatagtaggctt

SEQ ID NO: 22356 - DNA, 80 bp, synthetic construct
  misc_feature 1..80: note = Synthetic: >MK472070_5-cand-0-79
  source 1..80: mol_type = other DNA
ccactacaagatgaacgtaccaaagtcagacaagtcgctgccgccatttttggcacaggttaatgcttatgaaggagctt

SEQ ID NO: 22357 - DNA, 80 bp, synthetic construct
  misc_feature 1..80: note = Synthetic: >MH938448_8-cand-720-799
  source 1..80: mol_type = other DNA
tgcctgttgtagtcactgaaaatggtcgtgactttgagactgtagtccttgacacttctaagacttttgaagagcagctt

SEQ ID NO: 22358 - DNA, 80 bp, synthetic construct
  misc_feature 1..80: note = Synthetic: >MG596803_5-cand-790-869
  source 1..80: mol_type = other DNA
ccatgatactttttcatggtggtaacgaactatggcatactcattgtctattttccgtccacctaaccttgttccagctt

SEQ ID NO: 22359 - DNA, 80 bp, synthetic construct
  misc_feature 1..80: note = Synthetic: >GU393332_3-cand-0-79
  source 1..80: mol_type = other DNA
aagcttttatgtttttgtgacacactgtggtggaaccggtcatagttgcatagttaatacacaacagactggcgttctcg

SEQ ID NO: 22360 - DNA, 80 bp, synthetic construct
  misc_feature 1..80: note = Synthetic: >JQ065049_8-cand-20-99
  source 1..80: mol_type = other DNA
aaggaatggtagataattgggatatcactattcctggcgattacgttattgcagcacttgttgttatttgtgttgcagta

SEQ ID NO: 22361 - DNA, 80 bp, synthetic construct
  misc_feature 1..80: note = Synthetic: >MH938448_6-cand-400-479
  source 1..80: mol_type = other DNA
gccatcaaccttacatgggatgtctatgttaggcaggttttgtcaagtgttatgggttatcacacttctcttatgtcctt

SEQ ID NO: 22362 - DNA, 80 bp, synthetic construct
  misc_feature 1..80: note = Synthetic: >KU762338_17-cand-1860-1939
  source 1..80: mol_type = other DNA
aaggagcttatttctttgaccacgcgtcagatttatgcaccaccgcgggagatttcgcatgtctgaggtctaacgaactc

SEQ ID NO: 22363 - DNA, 80 bp, synthetic construct
  misc_feature 1..80: note = Synthetic: >GCS_003_13-cand-400-479
  source 1..80: mol_type = other DNA
ctgtttaacatgcagtttacctttgcaaagggtaaatttactttcctaaaggagaaactcaacaagtcctgtgtggcctt

SEQ ID NO: 22364 - DNA, 80 bp, synthetic construct
  misc_feature 1..80: note = Synthetic: >GCS_003_11-cand-270-349
  source 1..80: mol_type = other DNA
ctggtaatggcgttctattgagcggacatggtcttgctcaggatggcattctacacgtggttggacctgataaacgcctt

SEQ ID NO: 22365 - DNA, 80 bp, synthetic construct
  misc_feature 1..80: note = Synthetic: >KU762338_17-cand-2350-2429
  source 1..80: mol_type = other DNA
aagggaaggtgacctgtattggcaagaagcttgtattcacaccagcggctttacgcttgcagatgtgggtaaacgctatg

SEQ ID NO: 22366 - DNA, 80 bp, synthetic construct
  misc_feature 1..80: note = Synthetic: >MF113046_10-cand-690-769
  source 1..80: mol_type = other DNA
tgttttacaggtagtaaggataaaggacattacacttattattctggtgtgatgtacgacgccgacaagacatatccctt

SEQ ID NO: 22367 - DNA, 80 bp, synthetic construct
  misc_feature 1..80: note = Synthetic: >PDF_2560_5-cand-150-229
  source 1..80: mol_type = other DNA
atgcccggatggcactgttaatagacctgtgataagcaataatgggcaaactcaaacatatagttgtcctaaaggacctt

SEQ ID NO: 22368 - DNA, 80 bp, synthetic construct
  misc_feature 1..80: note = Synthetic: >EF065513_4-cand-110-189
  source 1..80: mol_type = other DNA
aaggtgctaatatcaaccgtctcggtgatatgggcacacgtaaccccagtaatgatggtgctataccagtgcaattagct

SEQ ID NO: 22369 - DNA, 80 bp, synthetic construct
  misc_feature 1..80: note = Synthetic: >JQ065046_7-cand-800-879
  source 1..80: mol_type = other DNA
atcgcgtctacagctgtgataatactgtgtgttgttcttgtacttgcaattcagcgactctttaaggagtacaccacctt

SEQ ID NO: 22370 - DNA, 80 bp, synthetic construct
  misc_feature 1..80: note = Synthetic: >KM347965_8-cand-130-209
  source 1..80: mol_type = other DNA
aaggttcctacatcgaagttgataaatctgtggttttatcattaccactggacgccaaattacattgtggtttggttgat

SEQ ID NO: 22371 - DNA, 80 bp, synthetic construct
  misc_feature 1..80: note = Synthetic: >KU762338_16-cand-1210-1289
  source 1..80: mol_type = other DNA
aaggttgttactttctatttagatggagttaaactcacacagattgacccggatttgactcagtatgtgaagcgcggtga

SEQ ID NO: 22372 - DNA, 80 bp, synthetic construct
  misc_feature 1..80: note = Synthetic: >MN611525_8-cand-220-299
  source 1..80: mol_type = other DNA
ttactaattggtttgtcctaacaaacaaatcaaccattattcaaggtcgcactactgccattcaacctttgcgtttactt

SEQ ID NO: 22373 - DNA, 80 bp, synthetic construct
  misc_feature 1..80: note = Synthetic: >MH938449_11-cand-820-899
  source 1..80: mol_type = other DNA
tactactggtcttggaactgttgaagctgattacaaagcctgcatagagagggctggtactgccgctgctgacattactt

SEQ ID NO: 22374 - DNA, 80 bp, synthetic construct
  misc_feature 1..80: note = Synthetic: >KJ473807_8-cand-0-79
  source 1..80: mol_type = other DNA
aagtacctcgcacatacgtagctttaccatatcatgctactcatatgtttgtcaatttgactgtgcatttgggtaacagt

SEQ ID NO: 22375 - DNA, 80 bp, synthetic construct
  misc_feature 1..80: note = Synthetic: >MG916904_9-cand-140-219
  source 1..80: mol_type = other DNA
acctgtcttctggccacaagctgcggagactttattaaattttctagacttgattgctggtttgctttatagctctactt

SEQ ID NO: 22376 - DNA, 80 bp, synthetic construct
  misc_feature 1..80: note = Synthetic: >MH817484_4-cand-180-259
  source 1..80: mol_type = other DNA
tgatttcaaacctgcaaacaacagcccttctcacattccttttggcaaaactatgcattcttatttctgttttgctactt

SEQ ID NO: 22377 - DNA, 80 bp, synthetic construct
  misc_feature 1..80: note = Synthetic: >GCS_003_12-cand-890-969
  source 1..80: mol_type = other DNA
ctaccggttgtgaactttggtatgagtggagcagacagtgtttgctacacaccatacagcgccattagttacagtgactt

SEQ ID NO: 22378 - DNA, 80 bp, synthetic construct
  misc_feature 1..80: note = Synthetic: >MG021451_5-cand-120-199
  source 1..80: mol_type = other DNA
gaagaattcgtcgatgtcgtaaaggatgaagttagtgagttgcttactaaacttcttcgcggtgtcgagattgaagactt

SEQ ID NO: 22379 - DNA, 80 bp, synthetic construct
  misc_feature 1..80: note = Synthetic: >MH938449_9-cand-580-659
  source 1..80: mol_type = other DNA
aagtctttgcatacgtattgtgttaaagatgttgattggtcaaggcctcttgaaagtgtaaagaaggcagcacctaagaa

SEQ ID NO: 22380 - DNA, 80 bp, synthetic construct
  misc_feature 1..80: note = Synthetic: >PDF_1704_4-cand-160-239
  source 1..80: mol_type = other DNA
cagttgagaatgttgattgtcctttcacattccacacattaaacaattatttaacttttgactcactttgtctttcactt

SEQ ID NO: 22381 - DNA, 80 bp, synthetic construct
  misc_feature 1..80: note = Synthetic: >HQ392470_1-cand-350-429
  source 1..80: mol_type = other DNA
ttacgttacatgtcgttttaaatgacactgaggaaagagcaaatatcatcttggctaaggctcctaaattagcctcactt

SEQ ID NO: 22382 - DNA, 80 bp, synthetic construct
  misc_feature 1..80: note = Synthetic: >MK720944_8-cand-0-79
  source 1..80: mol_type = other DNA
aagtggaaaaggttcacgttcagtaatgcttggtttgttccagctgcgtatacagaatgttaatacctttgaaccaactg

SEQ ID NO: 22383 - DNA, 80 bp, synthetic construct
  misc_feature 1..80: note = Synthetic: >MK472069_6-cand-0-79
  source 1..80: mol_type = other DNA
atgctaactctagttttgttaagtctgactattgctccagcatggtgtgtaagatctgtctccatggttatcaagaactt

SEQ ID NO: 22384 - DNA, 80 bp, synthetic construct
  misc_feature 1..80: note = Synthetic: >MH938450_6-cand-100-179
  source 1..80: mol_type = other DNA
gatttcaaatacattgaaaatgggcacctccgtgactttgataagcctttggattgtgtctataatgtttttgacaactt

SEQ ID NO: 22385 - DNA, 80 bp, synthetic construct
  misc_feature 1..80: note = Synthetic: >KJ473807_12-cand-720-799
  source 1..80: mol_type = other DNA
agtgtgaaaaaccgaaaggttttgttgaaccaaattgtgacaatctcccaagtgccatcaaaactactgtagaacaactt

SEQ ID NO: 22386 - DNA, 80 bp, synthetic construct
  misc_feature 1..80: note = Synthetic: >KY073746_8-cand-180-259
  source 1..80: mol_type = other DNA
tcgaggcagttaaaactgttttggcttcacgtaaaaagagtgctgtgtctgaagaggttgtgccgcctgttgataaactt

SEQ ID NO: 22387 - DNA, 80 bp, synthetic construct
  misc_feature 1..80: note = Synthetic: >KJ473814_1-cand-20-99
  source 1..80: mol_type = other DNA
gtatctgtctttgaatgcagcgcaaaacaccattgtctactttgacaatcatgtaatacctttctatgacggcatttatt

SEQ ID NO: 22388 - DNA, 80 bp, synthetic construct
  misc_feature 1..80: note = Synthetic: >MG596803_5-cand-390-469
  source 1..80: mol_type = other DNA
agcaggatctacataaagacctaacaccactcgctaacattttgcataatgttaagttcgatgttggtggttttattatt

SEQ ID NO: 22389 - DNA, 80 bp, synthetic construct
  misc_feature 1..80: note = Synthetic: >HM245925_11-cand-480-559
  source 1..80: mol_type = other DNA
aataatgcgaccatttccaatacttttgcaagtaatggtaccacatctaatagctggtggtttaatccagtctacaacct

SEQ ID NO: 22390 - DNA, 80 bp, synthetic construct
  misc_feature 1..80: note = Synthetic: >KJ473807_12-cand-80-159
  source 1..80: mol_type = other DNA
aataatgtgcttagtctgattgacgttgttctaactaaaccgtggttcgttcgaaaactcgaggaacttctcggagaagc

SEQ ID NO: 22391 - DNA, 80 bp, synthetic construct
  misc_feature 1..80: note = Synthetic: >EU022525_1-cand-260-339
  source 1..80: mol_type = other DNA
ctagagagcgtaggtctactaacgctgtttatactggtgaatgcacaggtttatttgcagctatgggtacatcttgtatt

SEQ ID NO: 22392 - DNA, 80 bp, synthetic construct
  misc_feature 1..80: note = Synthetic: >KP849472_2-cand-240-319
  source 1..80: mol_type = other DNA
tagatgggatagcctttctctatgatagttattgtgatggtgttgcatttttccatatgtgcaagtggtgggcacgtatt

SEQ ID NO: 22393 - DNA, 80 bp, synthetic construct
  misc_feature 1..80: note = Synthetic: >KY073746_8-cand-70-149
  source 1..80: mol_type = other DNA
aatacttagctgtggcatctttggtgttaaactcgaaacctctctcaatgtactcttggatgttatcacaggtaagccac

SEQ ID NO: 22394 - DNA, 80 bp, synthetic construct
  misc_feature 1..80: note = Synthetic: >MG916902_9-cand-490-569
  source 1..80: mol_type = other DNA
catttgttgtggtgccttgtgacttatctagccaggctgcagtcattggtgacaaagttgttggtgttatgacctctatt

SEQ ID NO: 22395 - DNA, 80 bp, synthetic construct
  misc_feature 1..80: note = Synthetic: >JQ065047_10-cand-1130-1209
  source 1..80: mol_type = other DNA
gatccaaatcagcaccgagcagaacaaaccccaaaacgcaccaaatacctaagagaactctcactaagggaaagactatt

SEQ ID NO: 22396 - DNA, 80 bp, synthetic construct
  misc_feature 1..80: note = Synthetic: >MN611525_12-cand-670-749
  source 1..80: mol_type = other DNA
aatagttactatagtttgccccatggtggttatattagactaccggaagttttggcgagcggttttgggtttagaactgt

SEQ ID NO: 22397 - DNA, 80 bp, synthetic construct
  misc_feature 1..80: note = Synthetic: >KF636752_11-cand-110-189
  source 1..80: mol_type = other DNA
gaaaacactactgtcgcagctagtgtatactactctcaactatgttgccaacctatgctgttgatcgaacagaaactatt

SEQ ID NO: 22398 - DNA, 80 bp, synthetic construct
  misc_feature 1..80: note = Synthetic: >GQ477367_1-cand-120-199
  source 1..80: mol_type = other DNA
aatataacagcagatcacagacaaaggttacatgtagtcgttcaaggcaacccatattctattacagttaccacgactcg

SEQ ID NO: 22399 - DNA, 80 bp, synthetic construct
  misc_feature 1..80: note = Synthetic: >MK472067_11-cand-140-219
  source 1..80: mol_type = other DNA
gtcctggctggtgtgccacagcgtacaggcataatattgagtagaagtatacgttacaatgttaaagcattgcgtatatt

SEQ ID NO: 22400 - DNA, 80 bp, synthetic construct
  misc_feature 1..80: note = Synthetic: >MG916903_10-cand-0-79
  source 1..80: mol_type = other DNA
atactagggatatcccaagatcctatgttgctctgccttaccatgccacacacatggtgctcaacataactgcatatatt

SEQ ID NO: 22401 - DNA, 80 bp, synthetic construct
  misc_feature 1..80: note = Synthetic: >KM347965_5-cand-0-79
  source 1..80: mol_type = other DNA
aatatattatgcacaccctgtatttaggtcaggcaacgtaacattgcacccacagggcactcaaaccatttgtgtcaata

SEQ ID NO: 22402 - DNA, 80 bp, synthetic construct
  misc_feature 1..80: note = Synthetic: >FJ376620_7-cand-0-79
  source 1..80: mol_type = other DNA
ctccaatattgttactgatgtttgtacggactacactatttatggtgtgtctggtacgggcattataactcattctgatt

SEQ ID NO: 22403 - DNA, 80 bp, synthetic construct
  misc_feature 1..80: note = Synthetic: >KX512809_3-cand-0-79
  source 1..80: mol_type = other DNA
caccccagcacgtgtaagttctgcaccagggtatgactttatggttattaggagtggtaaaattcagagttttgatgatt

SEQ ID NO: 22404 - DNA, 80 bp, synthetic construct
  misc_feature 1..80: note = Synthetic: >FJ376620_8-cand-340-419
  source 1..80: mol_type = other DNA
agaagagtcagaatcatcatctgttactagtaacagtccagaaccggttggtgatgatgtgcctagtgcacttgatgatt

SEQ ID NO: 22405 - DNA, 80 bp, synthetic construct
  misc_feature 1..80: note = Synthetic: >JQ065044_6-cand-30-109
  source 1..80: mol_type = other DNA
agcactctgttgtttttacaaccacttatttgttaccggcacttcttatgttggtagcgaattcatctactatttggatt

SEQ ID NO: 22406 - DNA, 80 bp, synthetic construct
  misc_feature 1..80: note = Synthetic: >KX512809_6-cand-270-349
  source 1..80: mol_type = other DNA
tctgttaatactataatggaacaagcacgtaatggttgcttgcctcttagtattatacctgcagcatctgcaacacgatt

SEQ ID NO: 22407 - DNA, 80 bp, synthetic construct
  misc_feature 1..80: note = Synthetic: >KY292377_4-cand-400-479
  source 1..80: mol_type = other DNA
aatgacttttacggctttcaatggactgatacttatgtggacatctatctaggaggcaccatcactaaagtgtggattga

SEQ ID NO: 22408 - DNA, 80 bp, synthetic construct
  misc_feature 1..80: note = Synthetic: >PDF_3316_5-cand-0-79
  source 1..80: mol_type = other DNA
cgttggtattatctcatctcaagagaataataccatgggttttgaacgttctgtggctttaccacagttttactatcatt

SEQ ID NO: 22409 - DNA, 80 bp, synthetic construct
  misc_feature 1..80: note = Synthetic: >MK472071_5-cand-10-89
  source 1..80: mol_type = other DNA
aatgctaggtctttttgaccttggcttggatggagttttggttaaaactacagtcaataggcctaatgtcgttcctatta

SEQ ID NO: 22410 - DNA, 80 bp, synthetic construct
  misc_feature 1..80: note = Synthetic: >KY073745_5-cand-330-409
  source 1..80: mol_type = other DNA
acgctaaccaaaatttgctgtctattactgagatcttgtatctgtccaaggaacagcacacacttcttccaggttccatt

SEQ ID NO: 22411 - DNA, 80 bp, synthetic construct
  misc_feature 1..80: note = Synthetic: >FJ376622_9-cand-530-609
  source 1..80: mol_type = other DNA
aatggggaagttgttccactaaaaattccagaacagattctctactaccctcacattgttagatacgtcagtaacaccta

SEQ ID NO: 22412 - DNA, 80 bp, synthetic construct
  misc_feature 1..80: note = Synthetic: >KX512810_11-cand-320-399
  source 1..80: mol_type = other DNA
aatggtactgtttatgacgctgataaaacatacccatttaaggtggacgacttgagcgtaacatccgttcttatgttaac

SEQ ID NO: 22413 - DNA, 80 bp, synthetic construct
  misc_feature 1..80: note = Synthetic: >KJ473810_8-cand-430-509
  source 1..80: mol_type = other DNA
ttggcattgtaaatatgtcatttaaagaaactcaacttgacgaggatttaacctctattacacttcacaatgttgacatt

SEQ ID NO: 22414 - DNA, 80 bp, synthetic construct
  misc_feature 1..80: note = Synthetic: >FJ376621_7-cand-410-489
  source 1..80: mol_type = other DNA
aatgtctgatatacctacttctggcttttatgtcattagggatggtgtgttagacaatatacgctcaacagatacatgct

SEQ ID NO: 22415 - DNA, 80 bp, synthetic construct
  misc_feature 1..80: note = Synthetic: >KX512809_10-cand-110-189
  source 1..80: mol_type = other DNA
agtgctatctcactggtaagcctgataaggatgttgttgacgccatagttgctggccacattaatgtctctagcaacatt

SEQ ID NO: 22416 - DNA, 80 bp, synthetic construct
  misc_feature 1..80: note = Synthetic: >MN611522_3-cand-630-709
  source 1..80: mol_type = other DNA
aatgttgtccagtctacatctagtgtgcttgttagcacggatagtagtggcaatgttaataacttcgtatactgcgattc

SEQ ID NO: 22417 - DNA, 80 bp, synthetic construct
  misc_feature 1..80: note = Synthetic: >KY073746_10-cand-570-649
  source 1..80: mol_type = other DNA
tcccacaattaattgacgatcatgggttgatcgccaatgccattttgtggctccttctgttgtgctttttcctgttaatt

SEQ ID NO: 22418 - DNA, 80 bp, synthetic construct
  misc_feature 1..80: note = Synthetic: >KP849472_3-cand-280-359
  source 1..80: mol_type = other DNA
aattatttacaatttgaaacattgtgctttgacactaatccttctgttgctggttgtaaatgggctgtaatgcattcccc

SEQ ID NO: 22419 - DNA, 80 bp, synthetic construct
  misc_feature 1..80: note = Synthetic: >MN611517_2-cand-40-119
  source 1..80: mol_type = other DNA
aattctgaacctcaaacacctaaattcaaccaggagctccctttaggagttactattgttgaagatgccgactcacgtgg

SEQ ID NO: 22420 - DNA, 80 bp, synthetic construct
  misc_feature 1..80: note = Synthetic: >MK492263_9-cand-890-969
  source 1..80: mol_type = other DNA
aattgagtggttcagtccacattacacagcagttgtctcattgtgcattgccctataaggacattctagacccaccacaa

SEQ ID NO: 22421 - DNA, 80 bp, synthetic construct
  misc_feature 1..80: note = Synthetic: >JQ065049_10-cand-330-409
  source 1..80: mol_type = other DNA
tttttacagagacatgggatgaacacttgctgtttcctgcagtagcattattgtcttctcatcctatgtatgcggcaatt

SEQ ID NO: 22422 - DNA, 80 bp, synthetic construct
  misc_feature 1..80: note = Synthetic: >MH938449_8-cand-0-79
  source 1..80: mol_type = other DNA
tccgtcagtgggtttgtgtggatactgggttccgtctcagttgaaacctacaactgcaactcatggctcgcaacccaatt

SEQ ID NO: 22423 - DNA, 80 bp, synthetic construct
  misc_feature 1..80: note = Synthetic: >FJ376621_11-cand-610-689
  source 1..80: mol_type = other DNA
cacagtagctttgaagcaacccagtcctactagagtagaattggttgtgggtgatttgtctactataaagtttgacaatt

SEQ ID NO: 22424 - DNA, 80 bp, synthetic construct
  misc_feature 1..80: note = Synthetic: >SBB_943_6-cand-940-1019
  source 1..80: mol_type = other DNA
atttgctgctgcgtgcggctttagaactggaagttactattggtaatttgcgtaccttacttgttattgtgcgcacaatt

SEQ ID NO: 22425 - DNA, 80 bp, synthetic construct
  misc_feature 1..80: note = Synthetic: >KX512809_13-cand-30-109
  source 1..80: mol_type = other DNA
aatttatttgtgacattggtacatcttatagttttgatggttctatagatgatgctatctctcagcttaacacacagttg

SEQ ID NO: 22426 - DNA, 80 bp, synthetic construct
  misc_feature 1..80: note = Synthetic: >KU762338_14-cand-270-349
  source 1..80: mol_type = other DNA
ataataatttgtacatagcccctgtacagcctaaagagctgcttgttaagtacaatgaccaaggcatgcctgtagaaatt

SEQ ID NO: 22427 - DNA, 80 bp, synthetic construct
  misc_feature 1..80: note = Synthetic: >JQ065049_13-cand-1140-1219
  source 1..80: mol_type = other DNA
aatttggttttaggtacaataacaggtatccatgtatttacttctacggcagcattgttagcttccacaggagtaattat

SEQ ID NO: 22428 - DNA, 80 bp, synthetic construct
  misc_feature 1..80: note = Synthetic: >FJ376620_2-cand-40-119
  source 1..80: mol_type = other DNA
ttcttgaggaaatagcagagttgggaacaacgagttctcctcatgcagtgctgttctcaagtgaacctgaatgtaaaatt

SEQ ID NO: 22429 - DNA, 80 bp, synthetic construct
  misc_feature 1..80: note = Synthetic: >KU762338_17-cand-2430-2509
  source 1..80: mol_type = other DNA
aattttctctcaggcataggaactgcctgcgccatgtcattaaaccccattcttttactgaggatgactcctcctaggtc

SEQ ID NO: 22430 - DNA, 80 bp, synthetic construct
  misc_feature 1..80: note = Synthetic: >JQ065044_9-cand-120-199
  source 1..80: mol_type = other DNA
aattttgctaacaaagccattaatcttacttttactgatcacgttttacgtgctgttattcagcatgcacctcagcgtgt

SEQ ID NO: 22431 - DNA, 80 bp, synthetic construct
  misc_feature 1..80: note = Synthetic: >MK472070_4-cand-0-79
  source 1..80: mol_type = other DNA
tacacggaaacgtaaccaggaaacagtcactccaaattttggtgtgaagctgccagcgaatattcaaattcagcaaaatt

SEQ ID NO: 22432 - DNA, 80 bp, synthetic construct
  misc_feature 1..80: note = Synthetic: >GCS_003_16-cand-1050-1129
  source 1..80: mol_type = other DNA
aattttggccgtagaggacctggtgacctagaaggcaactttggtgacctagaaatgcttaaactaggcactgatgaccc

SEQ ID NO: 22433 - DNA, 80 bp, synthetic construct
  misc_feature 1..80: note = Synthetic: >MH938450_9-cand-410-489
  source 1..80: mol_type = other DNA
ccattaaaagtattaagggcacagctgtcttttgtcaaaacccaggacctgttaatggagccattgtcaagcctatttgt

SEQ ID NO: 22434 - DNA, 80 bp, synthetic construct
  misc_feature 1..80: note = Synthetic: >KM347965_10-cand-0-79
  source 1..80: mol_type = other DNA
ttgttttgcataaacttgaaccattactgtgtgaaagtggctccgtaactttagataactttaaaggctgtgatatttgt

SEQ ID NO: 22435 - DNA, 80 bp, synthetic construct
  misc_feature 1..80: note = Synthetic: >KX512809_11-cand-0-79
  source 1..80: mol_type = other DNA
acaaatcaagagtgtcacttattgcaacagtcacatcaatgatatcaaatgctcacaaatgtctgatgtcctaccagatg

SEQ ID NO: 22436 - DNA, 80 bp, synthetic construct
  misc_feature 1..80: note = Synthetic: >JQ065049_5-cand-120-199
  source 1..80: mol_type = other DNA
ctgttggatgctaattcgttggcatcagtaattgtggcactttgtcactctttctttattactttgagtttgtttgttgt

SEQ ID NO: 22437 - DNA, 80 bp, synthetic construct
  misc_feature 1..80: note = Synthetic: >FJ376619_12-cand-730-809
  source 1..80: mol_type = other DNA
tactatccaagagtaaagggcggtgttgtcaatgtacctctaaagcaacagggaactgcagctaaaaagctgtctgttgt

SEQ ID NO: 22438 - DNA, 80 bp, synthetic construct
  misc_feature 1..80: note = Synthetic: >FJ376621_4-cand-200-279
  source 1..80: mol_type = other DNA
agtcaattacaaaatttgactttggatgttgtggcacgtgtgcaaacattgcaaattagttacaaggcaggtcgtcttgt

SEQ ID NO: 22439 - DNA, 80 bp, synthetic construct
  misc_feature 1..80: note = Synthetic: >KY073745_10-cand-1120-1199
  source 1..80: mol_type = other DNA
tccaatttcactttcgaatttgtatgctactgtgtctttgtgtttgcaattgttacctcttcattggctaagagccttgt

SEQ ID NO: 22440 - DNA, 80 bp, synthetic construct
  misc_feature 1..80: note = Synthetic: >KY073748_3-cand-100-179
  source 1..80: mol_type = other DNA
tgacgttttattgcactaacaatacagcagctgctagaccctatataccctttggtgtaagttccgatccatattattgt

SEQ ID NO: 22441 - DNA, 80 bp, synthetic construct
  misc_feature 1..80: note = Synthetic: >SBB_726_1-cand-40-119
  source 1..80: mol_type = other DNA
ttgctttattgcatatgtgcgagacctggtttattattgagaaccgcattgcagttagaacttagttctatttctattgt

SEQ ID NO: 22442 - DNA, 80 bp, synthetic construct
  misc_feature 1..80: note = Synthetic: >MK472068_10-cand-660-739
  source 1..80: mol_type = other DNA
ggtaaaatcccaccaggttttgactttactaattggttctttttgaccaacaacacatcacctttgcagggccggattgt

SEQ ID NO: 22443 - DNA, 80 bp, synthetic construct
  misc_feature 1..80: note = Synthetic: >KY073745_11-cand-2240-2319
  source 1..80: mol_type = other DNA
acaatgactttaatggtttaaaagttttgaagcaaagtcataacaattgttgggtcaacgctacttgcatacagctgcaa

SEQ ID NO: 22444 - DNA, 80 bp, synthetic construct
  misc_feature 1..80: note = Synthetic: >MK211379_9-cand-940-1019
  source 1..80: mol_type = other DNA
ctcattgcacattgccttataatgatattctagacccaccacaacctgtagtctggaggcgatatacggttgctaattgt

SEQ ID NO: 22445 - DNA, 80 bp, synthetic construct
  misc_feature 1..80: note = Synthetic: >GCS_003_14-cand-1130-1209
  source 1..80: mol_type = other DNA
acacaagagctatattgtattactggcaccttcacacctagtgtcggtgtttatcaattaagtcgctatcgtgccgaagc

SEQ ID NO: 22446 - DNA, 80 bp, synthetic construct
  misc_feature 1..80: note = Synthetic: >KJ473809_5-cand-0-79
  source 1..80: mol_type = other DNA
acacacctcagtttgagaatggctttaacatttcagctgtgcttcctgcgggtgaaggtaagggtagttttattgaggat

SEQ ID NO: 22447 - DNA, 80 bp, synthetic construct
  misc_feature 1..80: note = Synthetic: >KJ473810_11-cand-810-889
  source 1..80: mol_type = other DNA
acacaccttatcgtaattacgatgttagtgtggtgaataacaagtgtgttgtcaagtgtacttacactttccgtgcacca

SEQ ID NO: 22448 - DNA, 80 bp, synthetic construct
  misc_feature 1..80: note = Synthetic: >HM245925_12-cand-120-199
  source 1..80: mol_type = other DNA
tcaatttgttttactattaaagattcaaaacctttgttcatagtttctagtgctgcatctagtcttgttaggacgtgtgt

SEQ ID NO: 22449 - DNA, 80 bp, synthetic construct
  misc_feature 1..80: note = Synthetic: >HQ012370_3-cand-550-629
  source 1..80: mol_type = other DNA
acacagtcgagaagatcacgtagttcgacagtaaaagcagtcagcacagtaaacacctatactatgccacaattttatta

SEQ ID NO: 22450 - DNA, 80 bp, synthetic construct
  misc_feature 1..80: note = Synthetic: >KU762338_17-cand-3170-3249
  source 1..80: mol_type = other DNA
acaccacagaacatggcatttgggtgaccggcgatccacgtacgcgtgctattgcctggtgtctatcccgcatttctgcc

SEQ ID NO: 22451 - DNA, 80 bp, synthetic construct
  misc_feature 1..80: note = Synthetic: >KU762338_17-cand-1520-1599
  source 1..80: mol_type = other DNA
acaccactatctatgcagatgagaatgacaaacccaaatcccagcgcaggcgtaagaagcgcgaggcagctgttgtggaa

SEQ ID NO: 22452 - DNA, 80 bp, synthetic construct
  misc_feature 1..80: note = Synthetic: >MF593268_2-cand-100-179
  source 1..80: mol_type = other DNA
ctccacatttggactaggttctttagcctataacagtcccttgcgtgttgatgctcttaactcttctgagtttaaggtgt

SEQ ID NO: 22453 - DNA, 80 bp, synthetic construct
  misc_feature 1..80: note = Synthetic: >FJ938057_4-cand-220-299
  source 1..80: mol_type = other DNA
tacaaagatggtgcactgattactactatgccaaaggcacagccgggttttcaggacatytctaatgttgttaaaggtgt

SEQ ID NO: 22454 - DNA, 80 bp, synthetic construct
  misc_feature 1..80: note = Synthetic: >MK472068_10-cand-1860-1939
  source 1..80: mol_type = other DNA
cttggcttttatgaccctagtatactgtatgaagatgtttgtaccaattacaacatctatggtattgcgggtaaaggtgt

SEQ ID NO: 22455 - DNA, 80 bp, synthetic construct
  misc_feature 1..80: note = Synthetic: >PDF_1704_8-cand-230-309
  source 1..80: mol_type = other DNA
ggcaacattagcatacccactaacttttctatgtctgtgcaggttgaataccttcaaatgcacatacagccagttagtgt

SEQ ID NO: 22456 - DNA, 80 bp, synthetic construct
  misc_feature 1..80: note = Synthetic: >KJ473810_9-cand-450-529
  source 1..80: mol_type = other DNA
acactatttatggtgtctctggtagaggcatcattcgtaaggcaaattcgtcttacattagtgggttgtactacacatcc

SEQ ID NO: 22457 - DNA, 80 bp, synthetic construct
  misc_feature 1..80: note = Synthetic: >MK472068_8-cand-220-299
  source 1..80: mol_type = other DNA
acactcacatttgaccgatttgttttcttcattgaagaggacaaggttatgtgtgagcttatgtgtgattttgacttgaa

SEQ ID NO: 22458 - DNA, 80 bp, synthetic construct
  misc_feature 1..80: note = Synthetic: >FJ376620_12-cand-480-559
  source 1..80: mol_type = other DNA
acactttaaggtgtttgagataccgctctacatcagttattagcttttgtatgcaaatgttgcagtatggttatattgca

SEQ ID NO: 22459 - DNA, 80 bp, synthetic construct
  misc_feature 1..80: note = Synthetic: >KX512810_9-cand-440-519
  source 1..80: mol_type = other DNA
gtatttgctatcaatgctgtttttggtaacactgatttatgttatgaccatcaaggtatagctaagtccagggattctgt

SEQ ID NO: 22460 - DNA, 80 bp, synthetic construct
  misc_feature 1..80: note = Synthetic: >JN183882_4-cand-160-239
  source 1..80: mol_type = other DNA
acagatgtgatggtggatgttaatggcactgttatcactagattattctattgtgactcacccctcaatagaatcaagtg

SEQ ID NO: 22461 - DNA, 80 bp, synthetic construct
  misc_feature 1..80: note = Synthetic: >MH938450_2-cand-0-79
  source 1..80: mol_type = other DNA
tacttcgtaacaccaaggaacatgtttcaaccgcgtgtccctgttgttgcggattttgtgcagattcaatcttgtgctgt

SEQ ID NO: 22462 - DNA, 80 bp, synthetic construct
  misc_feature 1..80: note = Synthetic: >KY073745_11-cand-1440-1519
  source 1..80: mol_type = other DNA
acagccttatgtggttttcaacggtgttcttagtcgccttgcgcgtaagaaacctgctgatgttgattgctcatttgaca

SEQ ID NO: 22463 - DNA, 80 bp, synthetic construct
  misc_feature 1..80: note = Synthetic: >KU762338_13-cand-450-529
  source 1..80: mol_type = other DNA
cacttgtgtgcctgtgccgcaacgtaacggctaataccttcatagttgtttatgacaaacagctctattcaagagcctgt

SEQ ID NO: 22464 - DNA, 80 bp, synthetic construct
  misc_feature 1..80: note = Synthetic: >GCS_003_1-cand-40-119
  source 1..80: mol_type = other DNA
gtctggttgcgtctataatgttaataactgcactacacacacagttagtgtttgtgaaatgcctattggtaacagcctgt

SEQ ID NO: 22465 - DNA, 80 bp, synthetic construct
  misc_feature 1..80: note = Synthetic: >MG916902_6-cand-0-79
  source 1..80: mol_type = other DNA
ttctgttaccttgatgctgagcgcgacaaaataatgtcgtacttagagtctcttaagcatgttgatgtagctacccctgt

SEQ ID NO: 22466 - DNA, 80 bp, synthetic construct
  misc_feature 1..80: note = Synthetic: >FJ376619_9-cand-570-649
  source 1..80: mol_type = other DNA
acaggttaatgactcaagcttggactgaaagacttttgtttactgcattctcacttttaacctctcatccattgttggca

SEQ ID NO: 22467 - DNA, 80 bp, synthetic construct
  misc_feature 1..80: note = Synthetic: >MK472070_7-cand-120-199
  source 1..80: mol_type = other DNA
gttggattaccacgtctccattgttagtattgatatgcagggcgttattaacataatagtgtgtgtcattgttgcactgt

SEQ ID NO: 22468 - DNA, 80 bp, synthetic construct
  misc_feature 1..80: note = Synthetic: >JQ065048_10-cand-0-79
  source 1..80: mol_type = other DNA
acagtgttgttgatatggtgtatgaacctgagggtgaaattcgcaaggatcagcaatcaaagaaggatactcaacctaaa

SEQ ID NO: 22469 - DNA, 80 bp, synthetic construct
  misc_feature 1..80: note = Synthetic: >KJ473810_11-cand-890-969
  source 1..80: mol_type = other DNA
gcttacattgcagacacagagaattttgtgaaagcttgtgaggtgtgtgttgacaaagaaggttttgacgaattttatgt

SEQ ID NO: 22470 - DNA, 80 bp, synthetic construct
  misc_feature 1..80: note = Synthetic: >MG916902_7-cand-40-119
  source 1..80: mol_type = other DNA
tgcatttagtgtgcctaaagttcttgtttcgggtgtcctacacagtgtcagacgtgtaaaggctgatgaactagctatgt

SEQ ID NO: 22471 - DNA, 80 bp, synthetic construct
  misc_feature 1..80: note = Synthetic: >MG596803_5-cand-550-629
  source 1..80: mol_type = other DNA
acatattaaggagtggctcaaagtgcaaggatttacgttgtacaatagccgtcttcctttacatatgtctgttgcaaaat

SEQ ID NO: 22472 - DNA, 80 bp, synthetic construct
  misc_feature 1..80: note = Synthetic: >MH938450_10-cand-810-889
  source 1..80: mol_type = other DNA
gcagtttaccaacctgtacacagagcttatgtgatgtacaaagattttatgcgaatagaccccgcacctgtgtttgatgt

SEQ ID NO: 22473 - DNA, 80 bp, synthetic construct
  misc_feature 1..80: note = Synthetic: >FJ376619_10-cand-260-339
  source 1..80: mol_type = other DNA
attaatgatgacgagtttttggctattccagaattcgaccgtccacttaaagattacattcaagaaaaacaacttgatgt

SEQ ID NO: 22474 - DNA, 80 bp, synthetic construct
  misc_feature 1..80: note = Synthetic: >KU762338_2-cand-20-99
  source 1..80: mol_type = other DNA
actagctgcactacagacacagtggcctattacaatgcttccaaggagggtagacatgtaatggctatactggctgatgt

SEQ ID NO: 22475 - DNA, 80 bp, synthetic construct
  misc_feature 1..80: note = Synthetic: >MK211373_10-cand-190-269
  source 1..80: mol_type = other DNA
acatccttcttgattctaaattcagacagactggcttttgtctgtggtaagtattggtactataatgaccaaccttacct

SEQ ID NO: 22476 - DNA, 80 bp, synthetic construct
  misc_feature 1..80: note = Synthetic: >KU762338_17-cand-1360-1439
  source 1..80: mol_type = other DNA
ctccttaaggagaatgtggatgcctacaaggacttcccgcaaactccagaaagggagactaagaagaaaaagaaagatgt

SEQ ID NO: 22477 - DNA, 80 bp, synthetic construct
  misc_feature 1..80: note = Synthetic: >KX512809_9-cand-180-259
  source 1..80: mol_type = other DNA
gacgccaaattacattgtggtttggttgatggtgttttgtgcaaattcccaggttttgaagctgcatatgatgatcatgt

SEQ ID NO: 22478 - DNA, 80 bp, synthetic construct
  misc_feature 1..80: note = Synthetic: >KY073745_8-cand-540-619
  source 1..80: mol_type = other DNA
acatgattaaacttgtcgtagagaatacgactgtttatatgagtgttgtccctaatgagcttgaccctgcgttcagcaag

SEQ ID NO: 22479 - DNA, 80 bp, synthetic construct
  misc_feature 1..80: note = Synthetic: >JQ065047_6-cand-590-669
  source 1..80: mol_type = other DNA
acatgcccattaaattcactatttggcacgatagccaaaaagttgacacattatacccacttgtacaagccttgactaat

SEQ ID NO: 22480 - DNA, 80 bp, synthetic construct
  misc_feature 1..80: note = Synthetic: >KY073746_11-cand-280-359
  source 1..80: mol_type = other DNA
ccaacaattgggtaccaggcctttgtgataatccttcttatcctattcattgacctgttgtttccttctgtttgacatgt

SEQ ID NO: 22481 - DNA, 80 bp, synthetic construct
  misc_feature 1..80: note = Synthetic: >MG596802_5-cand-540-619
  source 1..80: mol_type = other DNA
acattcagccacaagttctttttacatgcgtacccactgtaggttattcggctgcattagccgtaaacgcatgtctcata

SEQ ID NO: 22482 - DNA, 80 bp, synthetic construct
  misc_feature 1..80: note = Synthetic: >MG916904_12-cand-990-1069
  source 1..80: mol_type = other DNA
acattgagtcttctttacagcttagtgcacgtcttgaatcgctagaagtgaatagtgcaattacagtgtcagaacgtgca

SEQ ID NO: 22483 - DNA, 80 bp, synthetic construct
  misc_feature 1..80: note = Synthetic: >KX722529_4-cand-300-379
  source 1..80: mol_type = other DNA
ttaaaatatgtcattggaagccaggtaatataagttcttaccaccaatttggtgttgatctaggagatagtggccaatgt

SEQ ID NO: 22484 - DNA, 80 bp, synthetic construct
  misc_feature 1..80: note = Synthetic: >KC869678_3-cand-1130-1209
  source 1..80: mol_type = other DNA
gttatataactaactgcaattatggagccacaaataaagacgatgttgttaaaccgggagggcgcgccagtcaacaatgt

SEQ ID NO: 22485 - DNA, 80 bp, synthetic construct
  misc_feature 1..80: note = Synthetic: >GU190215_2-cand-130-209
  source 1..80: mol_type = other DNA
ggttattattattaagtgtctgcttaggatgtttagtctatgcagtagcttcttttggtgccatcttatctggttttggt

SEQ ID NO: 22486 - DNA, 80 bp, synthetic construct
  misc_feature 1..80: note = Synthetic: >MG916904_13-cand-210-289
  source 1..80: mol_type = other DNA
tcatttgcggcaaatattggtattatgaggacaaaccctacatagtgttaccaggtggtgagcattttgttacatttggt

SEQ ID NO: 22487 - DNA, 80 bp, synthetic construct
  misc_feature 1..80: note = Synthetic: >MH938450_11-cand-170-249
  source 1..80: mol_type = other DNA
accaagacctggttgctgccgtccgtgaagctcttgctggattaggcattaaaccaagcaacagcaacaaatctacacct

SEQ ID NO: 22488 - DNA, 80 bp, synthetic construct
  misc_feature 1..80: note = Synthetic: >MH938449_1-cand-80-159
  source 1..80: mol_type = other DNA
ataattacttttatgttactgattatacagctttggccatgatgtttttgctgaacatgtctaacacatggtatcttggt

SEQ ID NO: 22489 - DNA, 80 bp, synthetic construct
  misc_feature 1..80: note = Synthetic: >KY073744_4-cand-230-309
  source 1..80: mol_type = other DNA
ccaacagtacatctgagtcttcccagaattctgcacaagatcttgttgccgctgttacggctgctttgaaaaatcttggt

SEQ ID NO: 22490 - DNA, 80 bp, synthetic construct
  misc_feature 1..80: note = Synthetic: >KY073748_2-cand-0-79
  source 1..80: mol_type = other DNA
ataccaaggaattgggtgactctgtgttgatcacttacactcataaagtgaaggtgcctaaagaacacccaaaccttggt

SEQ ID NO: 22491 - DNA, 80 bp, synthetic construct
  misc_feature 1..80: note = Synthetic: >GU190215_5-cand-180-259
  source 1..80: mol_type = other DNA
accaatacttaagctgccttttggtctcaacattacatatgttaaggccataatgacattgttttcttccactcaaagta

SEQ ID NO: 22492 - DNA, 80 bp, synthetic construct
  misc_feature 1..80: note = Synthetic: >MK492263_10-cand-1080-1159
  source 1..80: mol_type = other DNA
accaattgtttcaccagctatgcagtcactttacacatcactgcttgtgggtgctgtcgcatctgctggatacacgtttg

SEQ ID NO: 22493 - DNA, 80 bp, synthetic construct
  misc_feature 1..80: note = Synthetic: >KF530123_3-cand-300-379
  source 1..80: mol_type = other DNA
ttaaaatctgtaattggcggcaccttcatggtaatataagtgagcaccatgagtggtctgccagtctaggtgatggtggt

SEQ ID NO: 22494 - DNA, 80 bp, synthetic construct
  misc_feature 1..80: note = Synthetic: >MK472069_12-cand-2240-2319
  source 1..80: mol_type = other DNA
accacccgtcgcagttgaaagtcctatttttgaacacatcaagtatggtgacttggttgtgctcaaacaaaaagacaata

SEQ ID NO: 22495 - DNA, 80 bp, synthetic construct
  misc_feature 1..80: note = Synthetic: >KY073746_3-cand-0-79
  source 1..80: mol_type = other DNA
cccgcaatgagaatcgttccaacaatcagtctcgcaaccagtcgcgtaacaactcgcgatctaggtctaactcacgtggt

SEQ ID NO: 22496 - DNA, 80 bp, synthetic construct
  misc_feature 1..80: note = Synthetic: >GCS_003_15-cand-960-1039
  source 1..80: mol_type = other DNA
tacggtttgtttccttgcaacaaacaccatgggttcttatgtcccatgttcctactaatgtaccattggatactactggt

SEQ ID NO: 22497 - DNA, 80 bp, synthetic construct
  misc_feature 1..80: note = Synthetic: >KY566211_1-cand-90-169
  source 1..80: mol_type = other DNA
agtgtcaatttctccattagctcagttgagcagtatggtttctggaccatagcttacactaactatacagacgttatggt

SEQ ID NO: 22498 - DNA, 80 bp, synthetic construct
  misc_feature 1..80: note = Synthetic: >JN856008_2-cand-0-79
  source 1..80: mol_type = other DNA
ttgtagtgctaccttcatttatataccactctgaacttaacgtttcagtcactcttggtgttaagaagagtgggtatggt

SEQ ID NO: 22499 - DNA, 80 bp, synthetic construct
  misc_feature 1..80: note = Synthetic: >HQ012368_1-cand-0-79
  source 1..80: mol_type = other DNA
ttctgggtggttatctaccatattgtggaagtggtgataattgtggatggtataattttctttaccaacctcatgatggt

SEQ ID NO: 22500 - DNA, 80 bp, synthetic construct
  misc_feature 1..80: note = Synthetic: >GCS_003_11-cand-180-259
  source 1..80: mol_type = other DNA
gcggtgtggcgggagttctaaaccgcgcctctgacaacgcaatgcaggctgaatcaactgcctacatccgcgagcatggt

SEQ ID NO: 22501 - DNA, 80 bp, synthetic construct
  misc_feature 1..80: note = Synthetic: >MH924835_1-cand-420-499
  source 1..80: mol_type = other DNA
acccaatgggattgtgtttgtgcattttacctacacaccacaaacgtatgttaatgttacagcaattgtgggtttttgta

SEQ ID NO: 22502 - DNA, 80 bp, synthetic construct
  misc_feature 1..80: note = Synthetic: >GCS_019_8-cand-30-109
  source 1..80: mol_type = other DNA
gcacctgttagtgaacctgttgatgttgttgacgacgttgttgtacaaaagtcaagtgttaacactcagccatttagggt

SEQ ID NO: 22503 - DNA, 80 bp, synthetic construct
  misc_feature 1..80: note = Synthetic: >MK492263_11-cand-940-1019
  source 1..80: mol_type = other DNA
ctaaggaaagtgatgactcgacaactgtaaaacctacagtgccattgtatggcttaaaatccgcactggtacttaagggt

SEQ ID NO: 22504 - DNA, 80 bp, synthetic construct
  misc_feature 1..80: note = Synthetic: >GCS_003_14-cand-330-409
  source 1..80: mol_type = other DNA
acccttatatggcacattcaggacagactgtgagacaaaagttatacatgggcaatacctccaatacgcttgtataccca

SEQ ID NO: 22505 - DNA, 80 bp, synthetic construct
  misc_feature 1..80: note = Synthetic: >KJ473807_2-cand-0-79
  source 1..80: mol_type = other DNA
tgtcttatgcaacagctgtgaaaaagaacagcaaaactgttgttaataagacctttcaaaaactttacgataacatcggt

SEQ ID NO: 22506 - DNA, 80 bp, synthetic construct
  misc_feature 1..80: note = Synthetic: >MG916903_10-cand-210-289
  source 1..80: mol_type = other DNA
attgccctttcacctttgactcaattaataattatttaacatttgactccatctgcttctcaattgagcctattggcggt

SEQ ID NO: 22507 - DNA, 80 bp, synthetic construct
  misc_feature 1..80: note = Synthetic: >MH938448_5-cand-110-189
  source 1..80: mol_type = other DNA
accgtcacatcttacactggctttgactttaaatatattaaaaatggccgcctccatgactttgataagcgtttggactg

SEQ ID NO: 22508 - DNA, 80 bp, synthetic construct
  misc_feature 1..80: note = Synthetic: >KX512809_10-cand-10-89
  source 1..80: mol_type = other DNA
acctatgcaaaagacatagtagccactagcacttttgacaagtgtaagttagaaatacttgaccacactagtgatagctc

SEQ ID NO: 22509 - DNA, 80 bp, synthetic construct
  misc_feature 1..80: note = Synthetic: >KX512810_8-cand-10-89
  source 1..80: mol_type = other DNA
acctatgcaaaagatatagtagccactagcacttttgacaagtgtaggttagaaatacttgatcacactagtgacagctc

SEQ ID NO: 22510 - DNA, 80 bp, synthetic construct
  misc_feature 1..80: note = Synthetic: >FJ376622_7-cand-450-529
  source 1..80: mol_type = other DNA
ttttattctgcacagcaagatttatttcaatctaatgttagaactgtcataaccctgcctaagttacaagaggttgaggt

SEQ ID NO: 22511 - DNA, 80 bp, synthetic construct
  misc_feature 1..80: note = Synthetic: >NC_045512_1-cand-140-219
  source 1..80: mol_type = other DNA
acctctcatagatcttcaaatcctgttgttcttgagttggaatgtacaatattcaggtagagatgctggtacaaaaaaag

SEQ ID NO: 22512 - DNA, 80 bp, synthetic construct
  misc_feature 1..80: note = Synthetic: >KY073746_6-cand-300-379
  source 1..80: mol_type = other DNA
tttcaccatgtttataacatgtgacactgtttgtgggtgtaaagttagtagggcagaattcgctgggagtttcttcaggt

SEQ ID NO: 22513 - DNA, 80 bp, synthetic construct
  misc_feature 1..80: note = Synthetic: >PDF_3316_10-cand-100-179
  source 1..80: mol_type = other DNA
ctttctcacaatgaccttgcaacctgcttacgtgttggtgccaagtctgctaatcataacgttatgattaaagagcaggt

SEQ ID NO: 22514 - DNA, 80 bp, synthetic construct
  misc_feature 1..80: note = Synthetic: >MG916902_9-cand-220-299
  source 1..80: mol_type = other DNA
tagtccgcacatggtttggccaatctgtaccgtggaggactctttacgtgtcttacactaaaggctccagaatcacaggt

SEQ ID NO: 22515 - DNA, 80 bp, synthetic construct
  misc_feature 1..80: note = Synthetic: >KU762338_17-cand-3090-3169
  source 1..80: mol_type = other DNA
acgaactttgatggaccctgctgtgggtaacgctttggctgcgaatgtagtccgctgcatagcacaagacctacattttg

SEQ ID NO: 22516 - DNA, 80 bp, synthetic construct
  misc_feature 1..80: note = Synthetic: >FJ376622_12-cand-90-169
  source 1..80: mol_type = other DNA
acgaaggcaagattaccacaacccttgcagatgcaaagagtgttgtgcttactcataaggactcctacttaacgttatcc

SEQ ID NO: 22517 - DNA, 80 bp, synthetic construct
  misc_feature 1..80: note = Synthetic: >GCS_003_13-cand-0-79
  source 1..80: mol_type = other DNA
gatgcttggtgacacacctttgcccaaggatgagtttcatcctggaattgtgggcttgtcctatcatttctaccgtgcgt

SEQ ID NO: 22518 - DNA, 80 bp, synthetic construct
  misc_feature 1..80: note = Synthetic: >FJ376620_12-cand-300-379
  source 1..80: mol_type = other DNA
caactacatatcttttacctgcattcttaatgttcgttgttaaagcacctacattatggattcctaacacatacctgcgt

SEQ ID NO: 22519 - DNA, 80 bp, synthetic construct
  misc_feature 1..80: note = Synthetic: >MH938449_7-cand-310-389
  source 1..80: mol_type = other DNA
acgccaaactatcaattgatggagatgaggtgaaacctgctgctctatcaagcgttagtgttacagctgttgtagttaag

SEQ ID NO: 22520 - DNA, 80 bp, synthetic construct
  misc_feature 1..80: note = Synthetic: >MH938449_8-cand-300-379
  source 1..80: mol_type = other DNA
gtccaaaccttcttaaaggttggattgtgttttctagttgtccttgcgatgggattgtcttttgctcacttgatgggcgt

SEQ ID NO: 22521 - DNA, 80 bp, synthetic construct
  misc_feature 1..80: note = Synthetic: >EF065513_6-cand-450-529
  source 1..80: mol_type = other DNA
acttgttgaccattctaattcatgtttcgtcaacaacaccttttcggtgaatattagtactagtcgtattagcctagcgt

SEQ ID NO: 22522 - DNA, 80 bp, synthetic construct
  misc_feature 1..80: note = Synthetic: >KU762338_13-cand-880-959
  source 1..80: mol_type = other DNA
acggcgtgagactaccaacgcagctaaagtgactgaggttgtgcaagaagcaccacctgcggagccagttgttgcctcta

SEQ ID NO: 22523 - DNA, 80 bp, synthetic construct
  misc_feature 1..80: note = Synthetic: >MH938449_14-cand-170-249
  source 1..80: mol_type = other DNA
taccattgcctaataactggacttgtttgtctgctaacaatcaaggaccagtttttaatcgcattgttggaaaggcccgt

SEQ ID NO: 22524 - DNA, 80 bp, synthetic construct
  misc_feature 1..80: note = Synthetic: >KY073745_11-cand-2160-2239
  source 1..80: mol_type = other DNA
agttcaagaagtcaatgatgcactcaatttcatcgtccctactgaaagcagttataaacctgacccttttgcctacccgt

SEQ ID NO: 22525 - DNA, 80 bp, synthetic construct
  misc_feature 1..80: note = Synthetic: >MG916902_12-cand-430-509
  source 1..80: mol_type = other DNA
acggtgcctgaatgcttcagaacttgttttgaagtatttagagaattcgtgctcagtgtttttgatttcacagttaacac

SEQ ID NO: 22526 - DNA, 80 bp, synthetic construct
  misc_feature 1..80: note = Synthetic: >MG916903_6-cand-180-259
  source 1..80: mol_type = other DNA
acggtggcttaacagcatgtgtggatgcatacaaggctgagaataaggccgtaccagctggtaatatcatcacatttaag

SEQ ID NO: 22527 - DNA, 80 bp, synthetic construct
  misc_feature 1..80: note = Synthetic: >SBB_943_6-cand-610-689
  source 1..80: mol_type = other DNA
ctgcagggtttgacatccaagatgttggtgtcaaatatgatttctccctgcgtcataaaaattgtttgcggtataaacgt

SEQ ID NO: 22528 - DNA, 80 bp, synthetic construct
  misc_feature 1..80: note = Synthetic: >MH687943_2-cand-30-109
  source 1..80: mol_type = other DNA
atccaccagttagagggtttttctggggtttctttggttaccaaacttcagtacatctggctactagctttggtgttagt

SEQ ID NO: 22529 - DNA, 80 bp, synthetic construct
  misc_feature 1..80: note = Synthetic: >KU762338_16-cand-1130-1209
  source 1..80: mol_type = other DNA
atactaggaaacgcacaagcgacctattggtgcctgcgactgacatattatataaagatgtaaactttactaccagtagt

SEQ ID NO: 22530 - DNA, 80 bp, synthetic construct
  misc_feature 1..80: note = Synthetic: >FJ376620_13-cand-490-569
  source 1..80: mol_type = other DNA
ggagccatgatctattctgactatttgctttatccaggtgccaccatacgtattgtagatggaaagccagtagcactagt

SEQ ID NO: 22531 - DNA, 80 bp, synthetic construct
  misc_feature 1..80: note = Synthetic: >KY073745_3-cand-120-199
  source 1..80: mol_type = other DNA
actagttttgactaccatgtttccttcttgcagatggatatacagggtcttcttaatgtggttatatgtctgcttgttac

SEQ ID NO: 22532 - DNA, 80 bp, synthetic construct
  misc_feature 1..80: note = Synthetic: >JQ065047_9-cand-130-209
  source 1..80: mol_type = other DNA
actataatggtctaccacctcaatatgcattgacgtggaatgatgtaggccaagattacaaattacaagaacctcttgct

SEQ ID NO: 22533 - DNA, 80 bp, synthetic construct
  misc_feature 1..80: note = Synthetic: >HQ392469_1-cand-0-79
  source 1..80: mol_type = other DNA
actatacccaaaaacttcacagttgcagtacaggctgaatatattcagattcaagttaagcctgttgttgtggattgtgc

SEQ ID NO: 22534 - DNA, 80 bp, synthetic construct
  misc_feature 1..80: note = Synthetic: >MF593268_3-cand-1270-1349
  source 1..80: mol_type = other DNA
actatagtaatccctcttgtcgaattcattctaaagtgaattcttcgataggaatttcatatgctggtgcatacagttat

SEQ ID NO: 22535 - DNA, 80 bp, synthetic construct
  misc_feature 1..80: note = Synthetic: >EF065514_4-cand-360-439
  source 1..80: mol_type = other DNA
gacaacatcacaaatagcgtgacaacctttgacacgctgtctggttgtgtgtacaatgtgtacaatgccactaatatagt

SEQ ID NO: 22536 - DNA, 80 bp, synthetic construct
  misc_feature 1..80: note = Synthetic: >GQ504723_3-cand-60-139
  source 1..80: mol_type = other DNA
actattaatcagagtgcaatcgcatttacatcagcaactggaagggtaggtgtaaagaaaggcgtttgtactgtatactg

SEQ ID NO: 22537 - DNA, 80 bp, synthetic construct
  misc_feature 1..80: note = Synthetic: >KM454473_7-cand-560-639
  source 1..80: mol_type = other DNA
actattgactctgttattacacagggtgaattttatagctcaattgcgacgtttcctgcacgttgtatgtattttgcaac

SEQ ID NO: 22538 - DNA, 80 bp, synthetic construct
  misc_feature 1..80: note = Synthetic: >MK472069_10-cand-0-79
  source 1..80: mol_type = other DNA
tatgttgcctgaatacacaggttacactaatgtcacattgaaagtgcaggctaactacacaagagctcttacacttgagt

SEQ ID NO: 22539 - DNA, 80 bp, synthetic construct
  misc_feature 1..80: note = Synthetic: >GCS_003_16-cand-2760-2839
  source 1..80: mol_type = other DNA
actcactgtgctggccaaaggttttggcgtgcagctagagcaacctgatgcgctttgcgacgcaggtgctatttttacta

SEQ ID NO: 22540 - DNA, 80 bp, synthetic construct
  misc_feature 1..80: note = Synthetic: >JQ065046_2-cand-150-229
  source 1..80: mol_type = other DNA
actcctatttgactctcaatgtggatgtacttggtgcccctttcacctcaacagttctcgcccaagcgagtcctgtcaat

SEQ ID NO: 22541 - DNA, 80 bp, synthetic construct
  misc_feature 1..80: note = Synthetic: >MH938449_7-cand-0-79
  source 1..80: mol_type = other DNA
ctttccacacatcttaagcaatcaggccgttttgttgttgagcgtgttactgattcagagtgctgtaatgaacgtagagt

SEQ ID NO: 22542 - DNA, 80 bp, synthetic construct
  misc_feature 1..80: note = Synthetic: >MH938449_6-cand-310-389
  source 1..80: mol_type = other DNA
actcttgtctttggtgttaaaaccatttttggtgactctggtaactgttatgatctccaaggtgttgctaatgttgctag

SEQ ID NO: 22543 - DNA, 80 bp, synthetic construct
  misc_feature 1..80: note = Synthetic: >MH938450_6-cand-310-389
  source 1..80: mol_type = other DNA
actcttgtctttggtgttaaaactatttttggtgactctggtaactgttatgatcttcaaggtgttgctaatgttgctag

SEQ ID NO: 22544 - DNA, 80 bp, synthetic construct
  misc_feature 1..80: note = Synthetic: >KM347965_12-cand-570-649
  source 1..80: mol_type = other DNA
attgtacttctgattgtagtggctatgccgctaacatatttgctgtagaaaccggtggctttataccctccagtttcagt

SEQ ID NO: 22545 - DNA, 80 bp, synthetic construct
  misc_feature 1..80: note = Synthetic: >KU762338_17-cand-1940-2019
  source 1..80: mol_type = other DNA
ataatgaagcctgtcctgctcttgctctgcttgcttgctgctgcgcaggctattaccttaagttttaaggtgttgtcagt

SEQ ID NO: 22546 - DNA, 80 bp, synthetic construct
  misc_feature 1..80: note = Synthetic: >MH938449_11-cand-90-169
  source 1..80: mol_type = other DNA
gtaaaggagttataatgcgttctaactccacttacctagcaggcattagttactcagattctagtggtgctcttgtcagt

SEQ ID NO: 22547 - DNA, 80 bp, synthetic construct
  misc_feature 1..80: note = Synthetic: >PDF_1704_11-cand-540-619
  source 1..80: mol_type = other DNA
atgttgaaattacatacacctacaagatgcgagtgccaaagactgaaaaaaatcttccagcattcttgcagcaagtcagt

SEQ ID NO: 22548 - DNA, 80 bp, synthetic construct
  misc_feature 1..80: note = Synthetic: >MK472067_9-cand-40-119
  source 1..80: mol_type = other DNA
tgattcagatgtttatggagtgtttttccgttatgtagactctggtaggggtgttgagttgggtgtttcccaaagtcagt

SEQ ID NO: 22549 - DNA, 80 bp, synthetic construct
  misc_feature 1..80: note = Synthetic: >KY073746_7-cand-0-79
  source 1..80: mol_type = other DNA
actgccccagcatttcactcattctttcgtgcagctgtatgttacatatagtaatagaggtggctcttctcatacaccac

SEQ ID NO: 22550 - DNA, 80 bp, synthetic construct
  misc_feature 1..80: note = Synthetic: >KU762338_17-cand-2030-2109
  source 1..80: mol_type = other DNA
actgcctgccataaacatactcttatttcatgcccacagggtgatgtcgttaacatcacgcaagctgaaaggccatttac

SEQ ID NO: 22551 - DNA, 80 bp, synthetic construct
  misc_feature 1..80: note = Synthetic: >KY073746_9-cand-360-439
  source 1..80: mol_type = other DNA
cgttctttctacctacctaacagatgggacaccctttcttttaggtgttatttaactcagagttgtgtttttcagccagt

SEQ ID NO: 22552 - DNA, 80 bp, synthetic construct
  misc_feature 1..80: note = Synthetic: >MG772933_2-cand-270-349
  source 1..80: mol_type = other DNA
tcaaagtttacaccagtaaatttaaatcgtggcttgcctactggtctctcagtgcttcagccattggttgaattaccagt

SEQ ID NO: 22553 - DNA, 80 bp, synthetic construct
  misc_feature 1..80: note = Synthetic: >KU762338_17-cand-2110-2189
  source 1..80: mol_type = other DNA
agttatagcctgtgtgacgtttacgcacgtcctcttctcggacgtgggtaaatcgtttcagttgaccttcaatgaccagt

SEQ ID NO: 22554 - DNA, 80 bp, synthetic construct
  misc_feature 1..80: note = Synthetic: >MK211379_8-cand-270-349
  source 1..80: mol_type = other DNA
tagttggacctgacaagcgtcttaatcaagacgtagaacttttaaacaaagtttatgctgcatataaaggttatgacagt

SEQ ID NO: 22555 - DNA, 80 bp, synthetic construct
  misc_feature 1..80: note = Synthetic: >KU973692_2-cand-380-459
  source 1..80: mol_type = other DNA
acttacgtgagtttgtattcaagactagtgatgggtttctgcacatttatggtgcttaccagccttacgaccatgccata

SEQ ID NO: 22556 - DNA, 80 bp, synthetic construct
  misc_feature 1..80: note = Synthetic: >MG916902_12-cand-610-689
  source 1..80: mol_type = other DNA
caagcagggttaaagaaaattcagtatgctaatgctgttcttggtaaaacgaccagagttgttgttaagaaggttgaagt

SEQ ID NO: 22557 - DNA, 80 bp, synthetic construct
  misc_feature 1..80: note = Synthetic: >MG916902_10-cand-850-929
  source 1..80: mol_type = other DNA
acttctaattgttgtgcctgttagttgttgtaatgtatctttagtacaatacaacactaccttccagtacacaattgacg

SEQ ID NO: 22558 - DNA, 80 bp, synthetic construct
  misc_feature 1..80: note = Synthetic: >MH938450_10-cand-630-709
  source 1..80: mol_type = other DNA
acttgttaatcctaatctcttctcaactagacagaaatgttgctgaagttggttgatgatagtgggttgttgattaacgc

SEQ ID NO: 22559 - DNA, 80 bp, synthetic construct
  misc_feature 1..80: note = Synthetic: >MK211373_10-cand-480-559
  source 1..80: mol_type = other DNA
actttacgaagacccagacgcagtgttgtctgagtaaatccatacttactgcttggtatgctactgttaaatgtcactac

SEQ ID NO: 22560 - DNA, 80 bp, synthetic construct
  misc_feature 1..80: note = Synthetic: >KJ473807_10-cand-300-379
  source 1..80: mol_type = other DNA
ataccttttgctgattcaaatgagttgtacgttgctttgcgtggaactacagaagatgatgtacctttgtcccgtaaagt

SEQ ID NO: 22561 - DNA, 80 bp, synthetic construct
  misc_feature 1..80: note = Synthetic: >MK472069_7-cand-300-379
  source 1..80: mol_type = other DNA
actttcttgttgcctgctgtcattataatggctatgtacaacttgtcttgggatttcttccttcacgagatgttgtcaca

SEQ ID NO: 22562 - DNA, 80 bp, synthetic construct
  misc_feature 1..80: note = Synthetic: >FJ376619_12-cand-1280-1359
  source 1..80: mol_type = other DNA
actttgttgtgaagcttatccaaccactctgtgactttattacgcctttcttgcgtaaaattgcagggtttgccacttat

SEQ ID NO: 22563 - DNA, 80 bp, synthetic construct
  misc_feature 1..80: note = Synthetic: >MK472071_6-cand-660-739
  source 1..80: mol_type = other DNA
acttttccaattgaatggtaagtactatatcacaccacgtaacatgtaccaaccacgtgaccctactactgctgactttg

SEQ ID NO: 22564 - DNA, 80 bp, synthetic construct
  misc_feature 1..80: note = Synthetic: >KJ473810_6-cand-350-429
  source 1..80: mol_type = other DNA
gtgtgttctgtcaagaacctactccacttaatatcagtgaacttttggttgaaccactctgtgcttctgtgttcaaaagt

SEQ ID NO: 22565 - DNA, 80 bp, synthetic construct
  misc_feature 1..80: note = Synthetic: >EU022525_2-cand-210-289
  source 1..80: mol_type = other DNA
ataatgttttggtggggtctaggtactaaagtgggtcatcacgatcccacttttaatttaacatggggcaacttttttct

SEQ ID NO: 22566 - DNA, 80 bp, synthetic construct
  misc_feature 1..80: note = Synthetic: >MK472068_11-cand-2000-2079
  source 1..80: mol_type = other DNA
agaaacttggaatgacatgcttaatgtggtgaatgcatttatggatgctgttgctgcacaagttcaagtccccaagtact

SEQ ID NO: 22567 - DNA, 80 bp, synthetic construct
  misc_feature 1..80: note = Synthetic: >MK472071_4-cand-0-79
  source 1..80: mol_type = other DNA
gatcacctatgtgtacaagatgcgtgttaacaagaaagacccccaacttgttcgcttcttgccacacattagtgctttct

SEQ ID NO: 22568 - DNA, 80 bp, synthetic construct
  misc_feature 1..80: note = Synthetic: >FJ376620_10-cand-550-629
  source 1..80: mol_type = other DNA
ccattgccagctaatttaacagattttaccatttatcatacgggtcaactgtatgcaaatggttattatttaggtgttct

SEQ ID NO: 22569 - DNA, 80 bp, synthetic construct
  misc_feature 1..80: note = Synthetic: >EF065514_3-cand-30-109
  source 1..80: mol_type = other DNA
caagttggttgcccatttcaggtttaaaccttatgttagactaccccctccattattatatgagtgttggtgtaggttct

SEQ ID NO: 22570 - DNA, 80 bp, synthetic construct
  misc_feature 1..80: note = Synthetic: >KX512809_4-cand-0-79
  source 1..80: mol_type = other DNA
agaagtctctgactactgtccatctgatgatgatgctgatgaagatgggtgtgctgaaaatgcttcaccgtttgcttttg

SEQ ID NO: 22571 - DNA, 80 bp, synthetic construct
  misc_feature 1..80: note = Synthetic: >MK472068_7-cand-530-609
  source 1..80: mol_type = other DNA
tataacaccaagtctcaactaaacgtgatgtacccgtttcacctggttgaccaggatagctttcttataaatgctattct

SEQ ID NO: 22572 - DNA, 80 bp, synthetic construct
  misc_feature 1..80: note = Synthetic: >KU762338_17-cand-1280-1359
  source 1..80: mol_type = other DNA
agaatgatgccacctggcttaactaccgtggtgctattaagttgcccaaggacaacccaaactacgccacgtggatgaaa

SEQ ID NO: 22573 - DNA, 80 bp, synthetic construct
  misc_feature 1..80: note = Synthetic: >MN611517_4-cand-300-379
  source 1..80: mol_type = other DNA
caaacggtgtttatacattttatgttcctggtgctagtaaatggaattcagttggggtgaattgcccaatgggtaattct

SEQ ID NO: 22574 - DNA, 80 bp, synthetic construct
  misc_feature 1..80: note = Synthetic: >MK472068_11-cand-2650-2729
  source 1..80: mol_type = other DNA
taaaatccattgagggcactgcaatcttttgtcaaaacccaggtcctatgcctgatgtctatgttcaaccagttgtgtct

SEQ ID NO: 22575 - DNA, 80 bp, synthetic construct
  misc_feature 1..80: note = Synthetic: >MH817484_3-cand-200-279
  source 1..80: mol_type = other DNA
agaccgtgtaggcttattgatatccatacacggtaagtcatactacagtctgcttatggttttacaggatgaggcgtatg

SEQ ID NO: 22576 - DNA, 80 bp, synthetic construct
  misc_feature 1..80: note = Synthetic: >DQ848678_3-cand-0-79
  source 1..80: mol_type = other DNA
agactattctgggtggttatttaccatattgtggactgggtgacaattgtgggtggtttaattttgtctacaaacaacat

SEQ ID NO: 22577 - DNA, 80 bp, synthetic construct
  misc_feature 1..80: note = Synthetic: >MK472069_11-cand-90-169
  source 1..80: mol_type = other DNA
gaaacagatctcaaagccgaggcagacagcaaaacaatcagcagcaaaaccagcaacgcaattctggaggtcgaaagtct

SEQ ID NO: 22578 - DNA, 80 bp, synthetic construct
  misc_feature 1..80: note = Synthetic: >JN183883_3-cand-300-379
  source 1..80: mol_type = other DNA
atgcactgattataacatatatggattccagggcacaggcattgttaggagtaccacctcacgtttagtggctggtctct

SEQ ID NO: 22579 - DNA, 80 bp, synthetic construct
  misc_feature 1..80: note = Synthetic: >MK472068_10-cand-820-899
  source 1..80: mol_type = other DNA
agagcaagaatgctggtaggcgatgcaatggttatgaagatacaaaccttgttgcagaccacttgcgttttgctcttaac

SEQ ID NO: 22580 - DNA, 80 bp, synthetic construct
  misc_feature 1..80: note = Synthetic: >PDF_0663_3-cand-470-549
  source 1..80: mol_type = other DNA
tgcagtgcacccagagaaagcctacttagattatgttaacaatcatggtttgccattgtcaaactgtgttaaagtgctct

SEQ ID NO: 22581 - DNA, 80 bp, synthetic construct
  misc_feature 1..80: note = Synthetic: >MH938450_9-cand-100-179
  source 1..80: mol_type = other DNA
gtttgtgtacatctccagcttttggactgccttgaagaccctgctctagatttatttagagttggtcgtgttgcacctct

SEQ ID NO: 22582 - DNA, 80 bp, synthetic construct
  misc_feature 1..80: note = Synthetic: >MH938449_14-cand-1160-1239
  source 1..80: mol_type = other DNA
ctgggtttggcattccgtttggtaaaactgaccagccttactattgctttgtaacacaaggcaatgacacccaatactct

SEQ ID NO: 22583 - DNA, 80 bp, synthetic construct
  misc_feature 1..80: note = Synthetic: >GCS_019_9-cand-0-79
  source 1..80: mol_type = other DNA
caaacttgaacccgttaaaaaggtgagtgttgtcccattttacttgcttatgagtttgtttgtcgtttattttgcactct

SEQ ID NO: 22584 - DNA, 80 bp, synthetic construct
  misc_feature 1..80: note = Synthetic: >FJ376620_12-cand-210-289
  source 1..80: mol_type = other DNA
taccagtagacttatatccaattggtttgccagttgtagtgagtcttgcatttttaatcacactgagtgtgaaacactct

SEQ ID NO: 22585 - DNA, 80 bp, synthetic construct
  misc_feature 1..80: note = Synthetic: >MG916902_12-cand-970-1049
  source 1..80: mol_type = other DNA
tatcgtgtgtataatgtcagtgtggttaaacaacagtgtgttgtcacagttagttataccttcagagcaccaagttatct

SEQ ID NO: 22586 - DNA, 80 bp, synthetic construct
  misc_feature 1..80: note = Synthetic: >MG916903_9-cand-330-409
  source 1..80: mol_type = other DNA
agatacactactatgtagattgtatttctggcacttccaccactgttaaccaaccttgtgatggagtaatagaaagcact

SEQ ID NO: 22587 - DNA, 80 bp, synthetic construct
  misc_feature 1..80: note = Synthetic: >MK211374_1-cand-40-119
  source 1..80: mol_type = other DNA
agatcaaaaccggctcgtctactttgataaccaagtagtgccatttttagatggtatttactacgctgccacggaacgct

SEQ ID NO: 22588 - DNA, 80 bp, synthetic construct
  misc_feature 1..80: note = Synthetic: >MK472070_10-cand-630-709
  source 1..80: mol_type = other DNA
tttatgctgtgacaccttgtgatttgtcaaagcaggttgttgtgtacaccaatcgtataattggtgccatgactgcatct

SEQ ID NO: 22589 - DNA, 80 bp, synthetic construct
  misc_feature 1..80: note = Synthetic: >MG893511_2-cand-260-339
  source 1..80: mol_type = other DNA
agattggctttcaagacatttccaatttagtaaaagatgaatgtactgattataacatatacggttttcatggcacgggc

SEQ ID NO: 22590 - DNA, 80 bp, synthetic construct
  misc_feature 1..80: note = Synthetic: >KX512810_10-cand-380-459
  source 1..80: mol_type = other DNA
agcaaagacaagatgcttgttattggttgtagtctcaatgaccctcttcttgacttgccttttggtacccaaatctataa

SEQ ID NO: 22591 - DNA, 80 bp, synthetic construct
  misc_feature 1..80: note = Synthetic: >KY417145_2-cand-100-179
  source 1..80: mol_type = other DNA
tcaaccattgacaaatccaatgttgtcaggggttggatctttggaaccacgttagataacactactcaatctgcattgct

SEQ ID NO: 22592 - DNA, 80 bp, synthetic construct
  misc_feature 1..80: note = Synthetic: >KX512810_7-cand-350-429
  source 1..80: mol_type = other DNA
agcacatgacttttgagaaattgtgcatttcaacggtaccgttggatagtgactgtaagtttgatctaacagcgagaaca

SEQ ID NO: 22593 - DNA, 80 bp, synthetic construct
  misc_feature 1..80: note = Synthetic: >KY352407_2-cand-250-329
  source 1..80: mol_type = other DNA
agcacctgaattgcaggtacctgtcacactggaacaaaaagtaaaacctattgtagaagaaattgacatcactgttcgtg

SEQ ID NO: 22594 - DNA, 80 bp, synthetic construct
  misc_feature 1..80: note = Synthetic: >GCS_019_10-cand-250-329
  source 1..80: mol_type = other DNA
tccagcttctccaaagaagcagatggacaaaccaagatggaagcgcacaccaaatcaggaggaagatgtctcgaagtgct

SEQ ID NO: 22595 - DNA, 80 bp, synthetic construct
  misc_feature 1..80: note = Synthetic: >MG916903_12-cand-1640-1719
  source 1..80: mol_type = other DNA
atggtggtgtactcactgttgtggatgaatttgcgttttacaatagtggggatctctactatccagccaatgaaagtgct

SEQ ID NO: 22596 - DNA, 80 bp, synthetic construct
  misc_feature 1..80: note = Synthetic: >KP849472_1-cand-40-119
  source 1..80: mol_type = other DNA
tttttaaacactacatatactacctttgaggaaattgtgattgattatattgacattaacaagactatctctgatatgct

SEQ ID NO: 22597 - DNA, 80 bp, synthetic construct
  misc_feature 1..80: note = Synthetic: >HM245926_11-cand-240-319
  source 1..80: mol_type = other DNA
gttgaggttgttggaatcacttgcaaatgtgttgttcttggttgcaagtatttactttttgacaatgctcttgtcatgct

SEQ ID NO: 22598 - DNA, 80 bp, synthetic construct
  misc_feature 1..80: note = Synthetic: >KY073746_8-cand-0-79
  source 1..80: mol_type = other DNA
agcatgaggtttctctgcttacaaaagcctacaagacgattttacgcacacccggttttggtcttacaccaatacttagc

SEQ ID NO: 22599 - DNA, 80 bp, synthetic construct
  misc_feature 1..80: note = Synthetic: >MG021452_4-cand-40-119
  source 1..80: mol_type = other DNA
agcatggtgatttaggagagcagtatatttactctgtaggtcattcagattctaattatgactacttaggtaagcttttc

SEQ ID NO: 22600 - DNA, 80 bp, synthetic construct
  misc_feature 1..80: note = Synthetic: >KY073746_10-cand-650-729
  source 1..80: mol_type = other DNA
agcattactattataaagttgatacaactctgcttcacatgtcacatgttctttagcagaaccatttatcaacctgttta

SEQ ID NO: 22601 - DNA, 80 bp, synthetic construct
  misc_feature 1..80: note = Synthetic: >KM454473_3-cand-0-79
  source 1..80: mol_type = other DNA
agcattcgtctctttaagcgttgcaagtccttttgggctttcaaccctgagagcaatgctgtcgggtctatctccctcac

SEQ ID NO: 22602 - DNA, 80 bp, synthetic construct
  misc_feature 1..80: note = Synthetic: >MK720944_4-cand-0-79
  source 1..80: mol_type = other DNA
ctgttgtcttaactatgttccttaaacataaaatgttgtttcttaatacgtttttgatgccttctgttacacttttggct

SEQ ID NO: 22603 - DNA, 80 bp, synthetic construct
  misc_feature 1..80: note = Synthetic: >FJ376621_12-cand-660-739
  source 1..80: mol_type = other DNA
agccacttttaaccattcatgggcatatttcgttgatgaagcagatgtgcttcttaacataactgacagccagattcagg

SEQ ID NO: 22604 - DNA, 80 bp, synthetic construct
  misc_feature 1..80: note = Synthetic: >PDF_3316_8-cand-290-369
  source 1..80: mol_type = other DNA
taagactttgctatgtgtcgtactatgcgtacacatatcgctctatgcagtttataatttttaactcgtccttgctggct

SEQ ID NO: 22605 - DNA, 80 bp, synthetic construct
  misc_feature 1..80: note = Synthetic: >JQ065047_8-cand-0-79
  source 1..80: mol_type = other DNA
tcgtgttgactcagataaagtaaaagctttgtttgaattagcaaagagtgatgtaatacctttacatgctataactggct

SEQ ID NO: 22606 - DNA, 80 bp, synthetic construct
  misc_feature 1..80: note = Synthetic: >GCS_019_10-cand-1240-1319
  source 1..80: mol_type = other DNA
agcgagtctctcgtcagccatccgaaaggcaaaagcttcttgacctgtaggctgtaaacatgcctccatttctgttaact

SEQ ID NO: 22607 - DNA, 80 bp, synthetic construct
  misc_feature 1..80: note = Synthetic: >MF083115_2-cand-40-119
  source 1..80: mol_type = other DNA
agctactaagtgtacttgctggtgtcaaccagatccttccacatataaaggtgtaaacgcctggacttgtccgcaatcta

SEQ ID NO: 22608 - DNA, 80 bp, synthetic construct
  misc_feature 1..80: note = Synthetic: >FJ376619_11-cand-820-899
  source 1..80: mol_type = other DNA
gatgggttttactcagatccacaaaaaacatcattagcattaccacgtactattgttacactacctaaagttgctgagct

SEQ ID NO: 22609 - DNA, 80 bp, synthetic construct
  misc_feature 1..80: note = Synthetic: >KY417145_2-cand-0-79
  source 1..80: mol_type = other DNA
aggaccctttctccgttttaacactactctcacgtggtataactcatggaaccaagcttattcttcacctatcttgccct

SEQ ID NO: 22610 - DNA, 80 bp, synthetic construct
  misc_feature 1..80: note = Synthetic: >KY073747_3-cand-40-119
  source 1..80: mol_type = other DNA
ctggtaatggattttttattagagatactaaaccaggtgaggcatcttttgctttgactgacagtggaccttttagtcct

SEQ ID NO: 22611 - DNA, 80 bp, synthetic construct
  misc_feature 1..80: note = Synthetic: >KY073745_10-cand-590-669
  source 1..80: mol_type = other DNA
aggagctgaaagatcaggtgatgatcacttacacctatagtatgcttgtgcccaaagacaacaagcacctaggtcctttc

SEQ ID NO: 22612 - DNA, 80 bp, synthetic construct
  misc_feature 1..80: note = Synthetic: >MH938449_14-cand-1070-1149
  source 1..80: mol_type = other DNA
caggccatttgtcacttgtttctgttaataacacttttaatctaacctgcagcaatacctctgattttcagtcattgcct

SEQ ID NO: 22613 - DNA, 80 bp, synthetic construct
  misc_feature 1..80: note = Synthetic: >MK472069_5-cand-220-299
  source 1..80: mol_type = other DNA
aggcattgttgttaatgtcaacaagcctcaaccagtacccaaaaatgccttgcttgaaggcgtgtcttacacagcctacg

SEQ ID NO: 22614 - DNA, 80 bp, synthetic construct
  misc_feature 1..80: note = Synthetic: >HM245926_2-cand-40-119
  source 1..80: mol_type = other DNA
agggctatttacaatttgagaattaaaaatgcaagcacaaatagttgtaattctttctcttctagctcttgctttaggaa

SEQ ID NO: 22615 - DNA, 80 bp, synthetic construct
  misc_feature 1..80: note = Synthetic: >KX512810_9-cand-330-409
  source 1..80: mol_type = other DNA
cttatgctaaaacctgccctattgttgttggcactgtgtttgatattgttgatagtatgaaacctgtccctgatgtacct

SEQ ID NO: 22616 - DNA, 80 bp, synthetic construct
  misc_feature 1..80: note = Synthetic: >HM245926_11-cand-860-939
  source 1..80: mol_type = other DNA
aggtgaacctggttttttcaacaagtataaaaagctagaagcacttgaggatgtttatgacagtgatgattataaaaatc

SEQ ID NO: 22617 - DNA, 80 bp, synthetic construct
  misc_feature 1..80: note = Synthetic: >KU762338_13-cand-80-159
  source 1..80: mol_type = other DNA
tttattaaatgcgctgacatagtacaggaagctacgtcacgctcttacaaagtgttagtgaacgcagctaacgttaacct

SEQ ID NO: 22618 - DNA, 80 bp, synthetic construct
  misc_feature 1..80: note = Synthetic: >KP849472_4-cand-1010-1089
  source 1..80: mol_type = other DNA
tgaggataatagcacagctgaaatatcttgttacaatggagcaaatgttactgacccaacaattggcttcaacacaacct

SEQ ID NO: 22619 - DNA, 80 bp, synthetic construct
  misc_feature 1..80: note = Synthetic: >KF530123_4-cand-630-709
  source 1..80: mol_type = other DNA
ttgaaactttgtgttttgatgtgaatccagctgttgcaggttgtaggtggtcgctagtccatgacaacaagtggcgtact

SEQ ID NO: 22620 - DNA, 80 bp, synthetic construct
  misc_feature 1..80: note = Synthetic: >MG596802_5-cand-360-439
  source 1..80: mol_type = other DNA
ctgtagagctagtttccttgcgtgctgcaaataacggtcataagcagatcgtaaaatcaataccaatccaccatgatact

SEQ ID NO: 22621 - DNA, 80 bp, synthetic construct
  misc_feature 1..80: note = Synthetic: >GCS_003_11-cand-0-79
  source 1..80: mol_type = other DNA
tggaaggcatccccgaggccagtggacatgtaccaccagagaacatagctgatgaccatgttggcttcaaacagttgact

SEQ ID NO: 22622 - DNA, 80 bp, synthetic construct
  misc_feature 1..80: note = Synthetic: >MH938450_11-cand-880-959
  source 1..80: mol_type = other DNA
gtttaatttttgctttgcccattcaaaaagaggaagaacttgggtatgaacattgctcctttaaatggggcgatgtgact

SEQ ID NO: 22623 - DNA, 80 bp, synthetic construct
  misc_feature 1..80: note = Synthetic: >HQ392469_2-cand-430-509
  source 1..80: mol_type = other DNA
ctatggattccagtggactaacacgtatgtggatatatacttgggaggcactatcactaaagtgtgggttgacaatgact

SEQ ID NO: 22624 - DNA, 80 bp, synthetic construct
  misc_feature 1..80: note = Synthetic: >MH938449_10-cand-540-619
  source 1..80: mol_type = other DNA
tttggcgactatgtgctttttgataatgcactgtgtcgtattgtgcaggccaaaattaaaggtgcaaagcaagctggact

SEQ ID NO: 22625 - DNA, 80 bp, synthetic construct
  misc_feature 1..80: note = Synthetic: >PDF_1704_5-cand-40-119
  source 1..80: mol_type = other DNA
agtcgatgttaaagtgtcagaggacggtaaaaatgtgcacactgttaaagttaacacagacattgtcattgaccagcaac

SEQ ID NO: 22626 - DNA, 80 bp, synthetic construct
  misc_feature 1..80: note = Synthetic: >KY073744_6-cand-220-299
  source 1..80: mol_type = other DNA
cttcgccatgggcaaatgttggtattttgataaaaagaagtttggaaaggagttcgttgccgtttatggtggtgatcact

SEQ ID NO: 22627 - DNA, 80 bp, synthetic construct
  misc_feature 1..80: note = Synthetic: >KX512810_12-cand-70-149
  source 1..80: mol_type = other DNA
agtgcaaccatggtacggttgtgtgtttaatgtaagtgcaaacggcataatgctatccttgcatgacattaaagctctat

SEQ ID NO: 22628 - DNA, 80 bp, synthetic construct
  misc_feature 1..80: note = Synthetic: >MK472069_12-cand-2730-2809
  source 1..80: mol_type = other DNA
agtgcgttctttggtaacattggtagcggtcattaccgtaccaatttacaccaacgcaaacaggcagttgatggttttgg

SEQ ID NO: 22629 - DNA, 80 bp, synthetic construct
  misc_feature 1..80: note = Synthetic: >MH938450_8-cand-0-79
  source 1..80: mol_type = other DNA
agtgctatgatcaaacttaattttgatcgttacatcttctttgtggatgaaactctgtcattctgccaattggctaaagc

SEQ ID NO: 22630 - DNA, 80 bp, synthetic construct
  misc_feature 1..80: note = Synthetic: >GCS_003_15-cand-240-319
  source 1..80: mol_type = other DNA
gctatatggaatcctctgtcaaggagaagaaaaccttgactaaggtgctcacaactgtagacggtgttaactacagcact

SEQ ID NO: 22631 - DNA, 80 bp, synthetic construct
  misc_feature 1..80: note = Synthetic: >MK211373_11-cand-480-559
  source 1..80: mol_type = other DNA
agtggaccaggactataaacagtgtgtcaatgagtggggtattggtgaagttgctgatctttcatgtgcacaatattaca

SEQ ID NO: 22632 - DNA, 80 bp, synthetic construct
  misc_feature 1..80: note = Synthetic: >KC869678_3-cand-410-489
  source 1..80: mol_type = other DNA
tgcaggatgctcaaggtgtccacctgtacacttcgcgtaaaaatggtttcaattcaaacaatttatttttgtttgccact

SEQ ID NO: 22633 - DNA, 80 bp, synthetic construct
  misc_feature 1..80: note = Synthetic: >FJ376620_12-cand-390-469
  source 1..80: mol_type = other DNA
agtgggtctttgggctttctatgtctgaaagactcaccacttacactgtgggttgttatatagcggtttatgcttttata

SEQ ID NO: 22634 - DNA, 80 bp, synthetic construct
  misc_feature 1..80: note = Synthetic: >GU553362_2-cand-220-299
  source 1..80: mol_type = other DNA
gtgttgttgaagctagcatttcctactattggagtcactataaccagggatattacatgcaatttgtcaaccgtaccact

SEQ ID NO: 22635 - DNA, 80 bp, synthetic construct
  misc_feature 1..80: note = Synthetic: >KY073744_8-cand-0-79
  source 1..80: mol_type = other DNA
agtggtggtgtttaccgttttatggtgagccctactgctgtattgaatgagcctgcatttgctggtgacgcttcttataa

SEQ ID NO: 22636 - DNA, 80 bp, synthetic construct
  misc_feature 1..80: note = Synthetic: >MG916903_12-cand-510-589
  source 1..80: mol_type = other DNA
agttaagattgctgggcaacagttcaagtgtgtagggtcttacattttattggacaacgcgcttgttaagtttgccgatg

SEQ ID NO: 22637 - DNA, 80 bp, synthetic construct
  misc_feature 1..80: note = Synthetic: >KU762338_6-cand-170-249
  source 1..80: mol_type = other DNA
cgtagttaatggcgtaaagcgcgtgttctacgtgaatgcaaatggtgggacatactactgtactaaacataattggaact

SEQ ID NO: 22638 - DNA, 80 bp, synthetic construct
  misc_feature 1..80: note = Synthetic: >MF593268_3-cand-310-389
  source 1..80: mol_type = other DNA
ttggtaatttttctgctaataataagtcgggtgcttattttaatcacacccttcttatcttacctagcaagtgtggaact

SEQ ID NO: 22639 - DNA, 80 bp, synthetic construct
  misc_feature 1..80: note = Synthetic: >GCS_003_16-cand-3180-3259
  source 1..80: mol_type = other DNA
atgagcttcccctcctactcaggttttatcagattggtttgccataaaccctaccttctagttcgagctgctatggaact

SEQ ID NO: 22640 - DNA, 80 bp, synthetic construct
  misc_feature 1..80: note = Synthetic: >KY417145_2-cand-530-609
  source 1..80: mol_type = other DNA
ataaggttgttacaactttaaaacccacaaatcaggcctttcaagctgtttacatagtgggcaatttaaaacatacaact

SEQ ID NO: 22641 - DNA, 80 bp, synthetic construct
  misc_feature 1..80: note = Synthetic: >KF530123_4-cand-960-1039
  source 1..80: mol_type = other DNA
tagtaccatgtgatttgacagcacaagcagctgtgattaatgatgagatagttggagttataacagccattaatcaaact

SEQ ID NO: 22642 - DNA, 80 bp, synthetic construct
  misc_feature 1..80: note = Synthetic: >KX512809_4-cand-220-299
  source 1..80: mol_type = other DNA
agtttggtacaacttatgtatgccatgactaacagagaagttggtgatttaggtgaagctgaacatgtgttagaactttg

SEQ ID NO: 22643 - DNA, 80 bp, synthetic construct
  misc_feature 1..80: note = Synthetic: >PDF_0663_4-cand-1120-1199
  source 1..80: mol_type = other DNA
ataaccctcgtgttgttaccaagaaaacagcacaagaggcagctaagaagccaaggcagaaacgtgtgcctactactaaa

SEQ ID NO: 22644 - DNA, 80 bp, synthetic construct
  misc_feature 1..80: note = Synthetic: >MH938449_12-cand-360-439
  source 1..80: mol_type = other DNA
ctactttggcttggatttttggaaaatgttggtactataattttgaagattacacctgttatcgtggtggtgagtcttat

SEQ ID NO: 22645 - DNA, 80 bp, synthetic construct
  misc_feature 1..80: note = Synthetic: >KU973692_1-cand-30-109
  source 1..80: mol_type = other DNA
ataagctacctgatgactttactggttgtgttatagcttggaacactgccaaacaggacgttggtagttatttttatagg

SEQ ID NO: 22646 - DNA, 80 bp, synthetic construct
  misc_feature 1..80: note = Synthetic: >MK472070_11-cand-90-169
  source 1..80: mol_type = other DNA
tcacacaggacgctttactgagtgctgtgtcatacactggttatgttggttctctagatagaggccattatactgtgtat

SEQ ID NO: 22647 - DNA, 80 bp, synthetic construct
  misc_feature 1..80: note = Synthetic: >PDF_1704_10-cand-890-969
  source 1..80: mol_type = other DNA
atacagcctataataattacacttttacgtgcacaaatgacacctctgttacgggcaaaactattgtgccatttggtgtg

SEQ ID NO: 22648 - DNA, 80 bp, synthetic construct
  misc_feature 1..80: note = Synthetic: >MK720946_1-cand-40-119
  source 1..80: mol_type = other DNA
atacattccttataccagctgttattgtgacatctttttacaattttgcctgggattggtatgttacatctgtgattgca

SEQ ID NO: 22649 - DNA, 80 bp, synthetic construct
  misc_feature 1..80: note = Synthetic: >MG021452_6-cand-390-469
  source 1..80: mol_type = other DNA
tctaagctgcatgaccttgatgatgcgactcgttcatacatcggtagtacagcttacatcaaacagtatactacgcgtat

SEQ ID NO: 22650 - DNA, 80 bp, synthetic construct
  misc_feature 1..80: note = Synthetic: >MH938448_7-cand-0-79
  source 1..80: mol_type = other DNA
atacgtgctattgcctgaatattcaggccacactgaagtcacgttgactgttgatattacttttgaacctgccagttgta

SEQ ID NO: 22651 - DNA, 80 bp, synthetic construct
  misc_feature 1..80: note = Synthetic: >MK211379_8-cand-390-469
  source 1..80: mol_type = other DNA
ctgtggaagaatcactgcgtagtctagttgctaacgtcaactctgatacctatgtagtggtttatgataaacaactctat

SEQ ID NO: 22652 - DNA, 80 bp, synthetic construct
  misc_feature 1..80: note = Synthetic: >FJ938062_5-cand-150-229
  source 1..80: mol_type = other DNA
gtctactttgacgtacgagaacgctattatgatgacggcgtatgggatccagccgatagagttggcctattgatagctat

SEQ ID NO: 22653 - DNA, 80 bp, synthetic construct
  misc_feature 1..80: note = Synthetic: >MH938449_14-cand-1480-1559
  source 1..80: mol_type = other DNA
cttaacaggcttaaatgtcaacagcagcggttctttctggatgatggtttctactcatctgctgaagtagcccagcctat

SEQ ID NO: 22654 - DNA, 80 bp, synthetic construct
  misc_feature 1..80: note = Synthetic: >JQ065048_11-cand-310-389
  source 1..80: mol_type = other DNA
gcactggctaatttgcttgtggacaatccaattgctggggctttattacctaggaaaatgcttatcaatggtaagcctat

SEQ ID NO: 22655 - DNA, 80 bp, synthetic construct
  misc_feature 1..80: note = Synthetic: >GQ427174_1-cand-90-169
  source 1..80: mol_type = other DNA
ggttgttttaatcaaactaatcaaaccgattccacctgtaaaaatgggctttatagagggtcgccaggtaatcttactat

SEQ ID NO: 22656 - DNA, 80 bp, synthetic construct
  misc_feature 1..80: note = Synthetic: >FJ376621_3-cand-240-319
  source 1..80: mol_type = other DNA
tttgtggcaaaagcacccactctttggattccaaatacctatttaagaagtttgtatgaatgggtttttggtctcactat

SEQ ID NO: 22657 - DNA, 80 bp, synthetic construct
  misc_feature 1..80: note = Synthetic: >KJ473798_4-cand-130-209
  source 1..80: mol_type = other DNA
tgttagttcttctgctggtggtgagcattatagtgcttacatggctcagcagaatggcaaataccttgtgcttcgtatat

SEQ ID NO: 22658 - DNA, 80 bp, synthetic construct
  misc_feature 1..80: note = Synthetic: >KM347965_8-cand-390-469
  source 1..80: mol_type = other DNA
atgcttgttataggttgtagtcttaatgacccttctttagacttgccttttggtaccaaaatctatgatgatatggatat

SEQ ID NO: 22659 - DNA, 80 bp, synthetic construct
  misc_feature 1..80: note = Synthetic: >MG596803_1-cand-90-169
  source 1..80: mol_type = other DNA
atattatcaaagacggatgtttcaacacctgtcgatgattttattaaacatgttcaactcgaaggttcgtaccacaattg

SEQ ID NO: 22660 - DNA, 80 bp, synthetic construct
  misc_feature 1..80: note = Synthetic: >JQ065045_5-cand-610-689
  source 1..80: mol_type = other DNA
ctatcaacttcactgtatctattcagactgagtacatacagattgagcaccatcctattacggtggattgcagaaaatat

SEQ ID NO: 22661 - DNA, 80 bp, synthetic construct
  misc_feature 1..80: note = Synthetic: >JQ065046_4-cand-530-609
  source 1..80: mol_type = other DNA
atcacctatctcaatctcactgatcttactattgatgttgttatccctgattacgtagatgttaatcagactgttaatga

SEQ ID NO: 22662 - DNA, 80 bp, synthetic construct
  misc_feature 1..80: note = Synthetic: >JQ065046_9-cand-340-419
  source 1..80: mol_type = other DNA
tgtcagaacttgcttttgaccggacgggtggtatctacattaatggctaccgctattatttaactagcgccctccgtgat

SEQ ID NO: 22663 - DNA, 80 bp, synthetic construct
  misc_feature 1..80: note = Synthetic: >MH938450_12-cand-320-399
  source 1..80: mol_type = other DNA
atcgctttcaagatgactatgttgccaatatggactcgtgtagtgttgaaaacactactacattgtccataggccttaag

SEQ ID NO: 22664 - DNA, 80 bp, synthetic construct
  misc_feature 1..80: note = Synthetic: >PDF_2560_8-cand-720-799
  source 1..80: mol_type = other DNA
cattcttggctagtatttattttggtagtgtcataactcattattttgtagcacctagtgtctgcaatggtgatttagat

SEQ ID NO: 22665 - DNA, 80 bp, synthetic construct
  misc_feature 1..80: note = Synthetic: >MG916901_4-cand-150-229
  source 1..80: mol_type = other DNA
attacattgatgtcaacaagacgcttgaagagctggaacagcaacgacctaattacacgttgccagagcttgacatagat

SEQ ID NO: 22666 - DNA, 80 bp, synthetic construct
  misc_feature 1..80: note = Synthetic: >KY352407_3-cand-0-79
  source 1..80: mol_type = other DNA
taggagccatttatgagaacaccacctatgagtgtgatatacctatcggagctggaatctgtgctaagttcggctcagat

SEQ ID NO: 22667 - DNA, 80 bp, synthetic construct
  misc_feature 1..80: note = Synthetic: >MF593268_3-cand-790-869
  source 1..80: mol_type = other DNA
cgttttacatatatccactacatcaacttagctacttgctaaactttgacgtcaatggttatattacccaggctgcagat

SEQ ID NO: 22668 - DNA, 80 bp, synthetic construct
  misc_feature 1..80: note = Synthetic: >GU190215_4-cand-200-279
  source 1..80: mol_type = other DNA
atcttcagaaatttgtgaggaggtcaaccagaagcctgttgttgagttttcagaaactaaggagttgcatgaagagacca

SEQ ID NO: 22669 - DNA, 80 bp, synthetic construct
  misc_feature 1..80: note = Synthetic: >MH938449_10-cand-180-259
  source 1..80: mol_type = other DNA
tcttccgtcaggagtgccatagttgatggcatttttgatgtgagttttaaaatttgcaacctctttgatgagattttcat

SEQ ID NO: 22670 - DNA, 80 bp, synthetic construct
  misc_feature 1..80: note = Synthetic: >MK472069_9-cand-0-79
  source 1..80: mol_type = other DNA
atgaaacacaaggtatggatatccagttaggcttaccacctttaacaacagcctttgtgtctgggtaccttcctaagcca

SEQ ID NO: 22671 - DNA, 80 bp, synthetic construct
  misc_feature 1..80: note = Synthetic: >MG021451_4-cand-20-99
  source 1..80: mol_type = other DNA
ctacccattatcttcgagttatctttccaccatccagaaactggcatgtcagttctggacatatgattgatgatgttcat

SEQ ID NO: 22672 - DNA, 80 bp, synthetic construct
  misc_feature 1..80: note = Synthetic: >KF430219_1-cand-160-239
  source 1..80: mol_type = other DNA
atgaatgggtatcgctactttgctgctggtgatcttagtagtgttgatgttgagcttccttcacaacaagtttttggttc

SEQ ID NO: 22673 - DNA, 80 bp, synthetic construct
  misc_feature 1..80: note = Synthetic: >PDF_1704_9-cand-220-299
  source 1..80: mol_type = other DNA
atgagtggtcttactagtgctactatcactgtcgttgatggtgttgtaaacctcgttgctaacattcctgaatgttttgc

SEQ ID NO: 22674 - DNA, 80 bp, synthetic construct
  misc_feature 1..80: note = Synthetic: >KM347965_8-cand-250-329
  source 1..80: mol_type = other DNA
atgatcatgtagactattatttagatgtagactcacctttctacaagtttgtggacaccttctacgtggctaaattcaca

SEQ ID NO: 22675 - DNA, 80 bp, synthetic construct
  misc_feature 1..80: note = Synthetic: >GCS_003_15-cand-2010-2089
  source 1..80: mol_type = other DNA
ctgccaattgtatacgagagactaaaccaggtgcgaaaatcgtgggcatactgtgtatgttctaccgcgtccttttgcat

SEQ ID NO: 22676 - DNA, 80 bp, synthetic construct
  misc_feature 1..80: note = Synthetic: >MK211373_11-cand-590-669
  source 1..80: mol_type = other DNA
atgccaatatgatgacgctctacacggcttccttgactggtgctatggtttttggtggtattactgctagtgcttcaata

SEQ ID NO: 22677 - DNA, 80 bp, synthetic construct
  misc_feature 1..80: note = Synthetic: >KY073747_1-cand-290-369
  source 1..80: mol_type = other DNA
atgccagatagttgtagtatgcctatagaagcaacctggcactgggttacttactcaatagttggtgccttgtatgtgtc

SEQ ID NO: 22678 - DNA, 80 bp, synthetic construct
  misc_feature 1..80: note = Synthetic: >MG762674_3-cand-120-199
  source 1..80: mol_type = other DNA
atgctactaaaggttatgtgtttaacacaaccattttgcctgtagacttgggtgtgtttgttcacacgtggatgtatagg

SEQ ID NO: 22679 - DNA, 80 bp, synthetic construct
  misc_feature 1..80: note = Synthetic: >FJ376621_5-cand-320-399
  source 1..80: mol_type = other DNA
atgcttctgagcattcaagtgttcagacatcaaattccaatacctcagagatacaagctctacttcagcagggtttaccc

SEQ ID NO: 22680 - DNA, 80 bp, synthetic construct
  misc_feature 1..80: note = Synthetic: >KM347965_8-cand-10-89
  source 1..80: mol_type = other DNA
tcataacaatcatgttaattctaactttaacagttctgtctctgttctcaaattccttagggcaagaagatggcaagcat

SEQ ID NO: 22681 - DNA, 80 bp, synthetic construct
  misc_feature 1..80: note = Synthetic: >JQ065046_3-cand-200-279
  source 1..80: mol_type = other DNA
atggattccatgggcaattggaggtgcataccaattgatcacatggctccaatattaactccagttctcaagcatggcaa

SEQ ID NO: 22682 - DNA, 80 bp, synthetic construct
  misc_feature 1..80: note = Synthetic: >FJ376622_6-cand-0-79
  source 1..80: mol_type = other DNA
ccattcacattagttgtcaccatttggacagcagtggaaaatggatcaaaacccggaggagctgttttcattattgccat

SEQ ID NO: 22683 - DNA, 80 bp, synthetic construct
  misc_feature 1..80: note = Synthetic: >KX512809_6-cand-150-229
  source 1..80: mol_type = other DNA
atggccgagcaagctgcatctaacatgttcaaggaagcgcgtgctgtagaccgtaaatctaaaattatcggtgctatgca

SEQ ID NO: 22684 - DNA, 80 bp, synthetic construct
  misc_feature 1..80: note = Synthetic: >MG916901_6-cand-110-189
  source 1..80: mol_type = other DNA
atggcgtctgtactcacggcgacactattaggtgtagagttgtcgaagtacatggtacagtcatcattaccacatctagc

SEQ ID NO: 22685 - DNA, 80 bp, synthetic construct
  misc_feature 1..80: note = Synthetic: >FJ376619_12-cand-410-489
  source 1..80: mol_type = other DNA
atggttatctcactttgtcggctgactgtgttgggattccattcacgtccacacttctggcccaagctaaacctagcaat

SEQ ID NO: 22686 - DNA, 80 bp, synthetic construct
  misc_feature 1..80: note = Synthetic: >HQ012371_2-cand-200-279
  source 1..80: mol_type = other DNA
gtgtggattaacaatgattggaatgttgttgaatctagcatctcatatcattggaatcaatatagctctggatattacat

SEQ ID NO: 22687 - DNA, 80 bp, synthetic construct
  misc_feature 1..80: note = Synthetic: >KU762338_17-cand-80-159
  source 1..80: mol_type = other DNA
gctaaagctgcctccttacactggtacaagaaggcgttaactagagccataggcaaagaatctgccatcattgtgtacat

SEQ ID NO: 22688 - DNA, 80 bp, synthetic construct
  misc_feature 1..80: note = Synthetic: >MK472069_6-cand-320-399
  source 1..80: mol_type = other DNA
atgtatgttgtctatgtcgtacttcgtttcctctatcacgtttgctttggctgtgaaaaaccaaattgcattgcttgttc

SEQ ID NO: 22689 - DNA, 80 bp, synthetic construct
  misc_feature 1..80: note = Synthetic: >FJ376621_6-cand-130-209
  source 1..80: mol_type = other DNA
atgtgcaaccaggtgtttattgtgcagatagtggattccaattgcttactaattttataattggtactgtaactggtgtc

SEQ ID NO: 22690 - DNA, 80 bp, synthetic construct
  misc_feature 1..80: note = Synthetic: >KY073746_12-cand-580-659
  source 1..80: mol_type = other DNA
gtgcgtgagcacagtcttcgaactgccaagtatgccaatgctgtcattggttgtactgtagatgtgacaccaacacacat

SEQ ID NO: 22691 - DNA, 80 bp, synthetic construct
  misc_feature 1..80: note = Synthetic: >KX512810_13-cand-1950-2029
  source 1..80: mol_type = other DNA
atgttaaagatgttaaagctaataaaagtgttgctaaacacgacccgtgggctgctgccgtagacattcaagagacacag

SEQ ID NO: 22692 - DNA, 80 bp, synthetic construct
  misc_feature 1..80: note = Synthetic: >JQ065049_9-cand-240-319
  source 1..80: mol_type = other DNA
attaagtcagattcttctgactatgatagaattaagcaggctcttgacactgttgttgatcaaacttatgaggctccaat

SEQ ID NO: 22693 - DNA, 80 bp, synthetic construct
  misc_feature 1..80: note = Synthetic: >JN856008_3-cand-290-369
  source 1..80: mol_type = other DNA
tccaagctgtttctgtcaaaatttgccattggactagtggcagtattaataacactgtatggtatgcagctggtattaat

SEQ ID NO: 22694 - DNA, 80 bp, synthetic construct
  misc_feature 1..80: note = Synthetic: >KM347965_4-cand-170-249
  source 1..80: mol_type = other DNA
tagaaagctgcaccaccacgtttgttaatgcaactgtggcggaactacctagcataatacccgattacattgatattaat

SEQ ID NO: 22695 - DNA, 80 bp, synthetic construct
  misc_feature 1..80: note = Synthetic: >FJ376620_11-cand-410-489
  source 1..80: mol_type = other DNA
tttttggttttgtatgctactgcttttggtctttcaacaatagcatcttatgcatacaacccatcacaccctgctgtaat

SEQ ID NO: 22696 - DNA, 80 bp, synthetic construct
  misc_feature 1..80: note = Synthetic: >KX512810_5-cand-0-79
  source 1..80: mol_type = other DNA
attacttacaatttttgtgaagcacaaaatgctgtatttcatgtcattccttttacctagtgttattcttatgacagtta

SEQ ID NO: 22697 - DNA, 80 bp, synthetic construct
  misc_feature 1..80: note = Synthetic: >MK472068_10-cand-1620-1699
  source 1..80: mol_type = other DNA
attacttgtgacattgaagtgcgcactgataactgcccactcttctcgcctggaaaaatcaataactaccttaagtttgg

SEQ ID NO: 22698 - DNA, 80 bp, synthetic construct
  misc_feature 1..80: note = Synthetic: >KC869678_3-cand-330-409
  source 1..80: mol_type = other DNA
attcttcaacttggtcaattgcacttattttgaagagtttaatgtcacagcagacgaaagggcagagtggtttggcatcg

SEQ ID NO: 22699 - DNA, 80 bp, synthetic construct
  misc_feature 1..80: note = Synthetic: >KX512810_13-cand-410-489
  source 1..80: mol_type = other DNA
attgcaacacgtgcagtttgcagctttgttggaggttgtgttaaagtttgtttagaagggtttgattctgttgctgctaa

SEQ ID NO: 22700 - DNA, 80 bp, synthetic construct
  misc_feature 1..80: note = Synthetic: >GCS_003_16-cand-1620-1699
  source 1..80: mol_type = other DNA
attgcaactctgccaaaaacacggcgggcggcaatttggaggctactaatgttttgattacatacggcccatatttggca

SEQ ID NO: 22701 - DNA, 80 bp, synthetic construct
  misc_feature 1..80: note = Synthetic: >MK472069_12-cand-1680-1759
  source 1..80: mol_type = other DNA
attgctactgatgcagcaccttctcagagtggtcgtgctgtcgttgttggtgatcaagtgttttacacagatggtgataa

SEQ ID NO: 22702 - DNA, 80 bp, synthetic construct
  misc_feature 1..80: note = Synthetic: >KX512809_14-cand-560-639
  source 1..80: mol_type = other DNA
ccgtaaattggcgaaggttgaaggtcctatgttaacacctcttattagttgtggcatttttggtgtgccacttgagcaat

SEQ ID NO: 22703 - DNA, 80 bp, synthetic construct
  misc_feature 1..80: note = Synthetic: >KF530123_4-cand-720-799
  source 1..80: mol_type = other DNA
ctatcacagtttcttataaagacggtgctatgatcacgactatgccaaaggcgcagctgggttttcaagacatttccaat

SEQ ID NO: 22704 - DNA, 80 bp, synthetic construct
  misc_feature 1..80: note = Synthetic: >JQ065044_10-cand-880-959
  source 1..80: mol_type = other DNA
attgtaaggattgtgatagtacaaaccccaccactttcatccctactgaagcagttgagtctctttcaaagatcactcga

SEQ ID NO: 22705 - DNA, 80 bp, synthetic construct
  misc_feature 1..80: note = Synthetic: >FJ376621_9-cand-420-499
  source 1..80: mol_type = other DNA
ttttcctcaattggcatttgtcctgatggttctattatgcaggtcaacactactgttgacacactacctgcaacaacaat

SEQ ID NO: 22706 - DNA, 80 bp, synthetic construct
  misc_feature 1..80: note = Synthetic: >KY073745_11-cand-1200-1279
  source 1..80: mol_type = other DNA
cgttctttttcagatagatggtggaaaaatttgggatacagttgttaactcgtgtaaggctctatttgactttgttaaat

SEQ ID NO: 22707 - DNA, 80 bp, synthetic construct
  misc_feature 1..80: note = Synthetic: >FJ376619_5-cand-90-169
  source 1..80: mol_type = other DNA
ccacactactggcttttatgtcatacgtgatggagttttagacactatccgttcaacagacacttgtttttcaaataaat

SEQ ID NO: 22708 - DNA, 80 bp, synthetic construct
  misc_feature 1..80: note = Synthetic: >MK472069_11-cand-530-609
  source 1..80: mol_type = other DNA
gctcagctcatcccatcccaggctgcaattctctttggcagtgaagtcacagccagagaggttggcgatgacatcgaaat

SEQ ID NO: 22709 - DNA, 80 bp, synthetic construct
  misc_feature 1..80: note = Synthetic: >GCS_242_1-cand-240-319
  source 1..80: mol_type = other DNA
atttgaagcttttagagactttgttcgctctgaagaggagcggttctctcaattttgtaacaaggtgtgtgcacctataa

SEQ ID NO: 22710 - DNA, 80 bp, synthetic construct
  misc_feature 1..80: note = Synthetic: >PDF_3316_6-cand-110-189
  source 1..80: mol_type = other DNA
gaaccgtggtaagaaagtttccattccttcaaaatggtacttctatttcctcggcacaggtccacatgctggtctcaaat

SEQ ID NO: 22711 - DNA, 80 bp, synthetic construct
  misc_feature 1..80: note = Synthetic: >KJ473809_7-cand-800-879
  source 1..80: mol_type = other DNA
atttgcgtaatcaactaaattatgaaattgctcctgttagtgtgtcttgcagccattgtggctaattacaccatggactc

SEQ ID NO: 22712 - DNA, 80 bp, synthetic construct
  misc_feature 1..80: note = Synthetic: >GCS_017_1-cand-110-189
  source 1..80: mol_type = other DNA
atttggtgttgtacattcgcattatcaacctaaagatgtaaatttgactttgaatggtgggagtgaaatatgtgttcgta

SEQ ID NO: 22713 - DNA, 80 bp, synthetic construct
  misc_feature 1..80: note = Synthetic: >MF113046_9-cand-390-469
  source 1..80: mol_type = other DNA
atttgtatggtgacgtgtaccgcataaagcttgtaaaccactggtttaacaatgcatccttggcactcatgcggtctgca

SEQ ID NO: 22714 - DNA, 80 bp, synthetic construct
  misc_feature 1..80: note = Synthetic: >MH938448_9-cand-490-569
  source 1..80: mol_type = other DNA
attttctctgctgaacctgttgtgggcattactgttatcaatgataactacaagcttcgtgagtttactgcggtgcttaa

SEQ ID NO: 22715 - DNA, 80 bp, synthetic construct
  misc_feature 1..80: note = Synthetic: >KY073745_3-cand-0-79
  source 1..80: mol_type = other DNA
attttgacgggttttgtcaaacataagatgttgtttttgcaagctttccttttgcccgttgttatggcaatggctattta

SEQ ID NO: 22716 - DNA, 80 bp, synthetic construct
  misc_feature 1..80: note = Synthetic: >KY073746_12-cand-1150-1229
  source 1..80: mol_type = other DNA
catgcaaagtcacaggagtttttgggtaacttgtgtcctaagtgtcccgccgttctttttcagatagatggtggaaaaat

SEQ ID NO: 22717 - DNA, 80 bp, synthetic construct
  misc_feature 1..80: note = Synthetic: >MG916903_10-cand-480-559
  source 1..80: mol_type = other DNA
taattagtcgttctaatgcttcatacattgctggtctctattacacagccatttcaggacaacttttgggtttcaaaaat

SEQ ID NO: 22718 - DNA, 80 bp, synthetic construct
  misc_feature 1..80: note = Synthetic: >MG916902_12-cand-700-779
  source 1..80: mol_type = other DNA
gatttaactcttgttgaagaacctgtcactcttgttaaagatggtgtcaccaaggttattggtagccaagctttcttttg

SEQ ID NO: 22719 - DNA, 80 bp, synthetic construct
  misc_feature 1..80: note = Synthetic: >GCS_003_16-cand-240-319
  source 1..80: mol_type = other DNA
caaacaccgaaggtgtcgtttaaacaagagtctgattctgactccgaggcagacaggcatactactcgtaatggtgcaag

SEQ ID NO: 22720 - DNA, 80 bp, synthetic construct
  misc_feature 1..80: note = Synthetic: >KX512810_11-cand-430-509
  source 1..80: mol_type = other DNA
cagtgtacctaaaagtgtttcggatgcaagcaagccagataccatgcaaaagctagacgagtatgcaaacatgttctttg

SEQ ID NO: 22721 - DNA, 80 bp, synthetic construct
  misc_feature 1..80: note = Synthetic: >MN611521_3-cand-110-189
  source 1..80: mol_type = other DNA
taccagaccgcaactagctttggtgttagttgtcacgattgtgttactaagataaacccaccttatagtctttatctttg

SEQ ID NO: 22722 - DNA, 80 bp, synthetic construct
  misc_feature 1..80: note = Synthetic: >MK472069_6-cand-100-179
  source 1..80: mol_type = other DNA
cctcacatgggaatttgttacacatccattgctgcagagtttcatgccttttgtttacatgctgttcttgctttgctttg

SEQ ID NO: 22723 - DNA, 80 bp, synthetic construct
  misc_feature 1..80: note = Synthetic: >MK211379_10-cand-780-859
  source 1..80: mol_type = other DNA
gtttgtcaacctgtgtgccactcagttaagatttattgtcctgaatctaatcttttggaatcagaaaaatttgaaatttg

SEQ ID NO: 22724 - DNA, 80 bp, synthetic construct
  misc_feature 1..80: note = Synthetic: >MK492263_3-cand-40-119
  source 1..80: mol_type = other DNA
gaatgctgtatatttttctgcaaacaaacctaagtgtgtatgtgctaaaggacctctgcatgcatctgttaatggtgttg

SEQ ID NO: 22725 - DNA, 80 bp, synthetic construct
  misc_feature 1..80: note = Synthetic: >FJ376622_4-cand-30-109
  source 1..80: mol_type = other DNA
tccaaacacatatcttcgtacactgtaccagtatgtgtttggctcctcaatttcacagcagttatactgttatagtgttg

SEQ ID NO: 22726 - DNA, 80 bp, synthetic construct
  misc_feature 1..80: note = Synthetic: >FJ376620_13-cand-810-889
  source 1..80: mol_type = other DNA
tttccatgctaagcctgatgatgttttgatggcttttatccaacttcaggagtttcttaacagaactactggttctgttg

SEQ ID NO: 22727 - DNA, 80 bp, synthetic construct
  misc_feature 1..80: note = Synthetic: >KU762338_7-cand-0-79
  source 1..80: mol_type = other DNA
caacagcaccctcatgcagttgtcatcatacagtttgtacgatttacagcgattctcactccgtgctaaaggcaccccag

SEQ ID NO: 22728 - DNA, 80 bp, synthetic construct
  misc_feature 1..80: note = Synthetic: >GU190215_3-cand-210-289
  source 1..80: mol_type = other DNA
caacggttatgttacatctgcttctaagagtgctgaagaacactttattgaaacagtttccttagcgggttcatacaagg

SEQ ID NO: 22729 - DNA, 80 bp, synthetic construct
  misc_feature 1..80: note = Synthetic: >MK472069_10-cand-270-349
  source 1..80: mol_type = other DNA
caactaccttaagtttggtagtatttgcttttcactgacagacaatggtggttgcagaatacctgttatcagttattcac

SEQ ID NO: 22730 - DNA, 80 bp, synthetic construct
  misc_feature 1..80: note = Synthetic: >MK211373_9-cand-180-259
  source 1..80: mol_type = other DNA
tgctgatgtaaggacggctattgctgagggattcattattgttggtagttgcattttcgacatacttgatgaggttcttg

SEQ ID NO: 22731 - DNA, 80 bp, synthetic construct
  misc_feature 1..80: note = Synthetic: >KY073746_12-cand-1640-1719
  source 1..80: mol_type = other DNA
gcaggtttatcatctctgatgatttcctgtggtacaacaaagatgacctttattatcctgctggtttgagtggtgtcttg

SEQ ID NO: 22732 - DNA, 80 bp, synthetic construct
  misc_feature 1..80: note = Synthetic: >GCS_003_13-cand-720-799
  source 1..80: mol_type = other DNA
ggaagagctcaatgggacacttgaagaagtttttggatttgacgaccttacgctcgtaagaggttcactggttgcacttg

SEQ ID NO: 22733 - DNA, 80 bp, synthetic construct
  misc_feature 1..80: note = Synthetic: >MK472068_3-cand-160-239
  source 1..80: mol_type = other DNA
gctgttcttgttgtgttttggtaacaacgttgttcgtttccttatgctctacttcatcttacagtatgttaatgcacttg

SEQ ID NO: 22734 - DNA, 80 bp, synthetic construct
  misc_feature 1..80: note = Synthetic: >KY073745_6-cand-0-79
  source 1..80: mol_type = other DNA
gtttgtcatttattttgcactctttaaacctaggtctcccaggtctagagtgctcattttggctgctaaagtgctaattg

SEQ ID NO: 22735 - DNA, 80 bp, synthetic construct
  misc_feature 1..80: note = Synthetic: >MH938450_3-cand-120-199
  source 1..80: mol_type = other DNA
ttggctttgctggtgtcgcagaggccgtgcaacaatttagttgtgccgctggcgacggttttaagcaatgccggtttgtg

SEQ ID NO: 22736 - DNA, 80 bp, synthetic construct
  misc_feature 1..80: note = Synthetic: >GCS_003_12-cand-640-719
  source 1..80: mol_type = other DNA
cacaatgactgcagtgccttatgatgttattgactttaaggtaatagacaatgcaattctcagggatatagtgcctactg

SEQ ID NO: 22737 - DNA, 80 bp, synthetic construct
  misc_feature 1..80: note = Synthetic: >JQ989270_3-cand-90-169
  source 1..80: mol_type = other DNA
gtgaaacatggtcattgtatgtttctcatggcaataatagaggtgttatgacctttagaatttgtaaatggccacgtgtg

SEQ ID NO: 22738 - DNA, 80 bp, synthetic construct
  misc_feature 1..80: note = Synthetic: >MH938448_3-cand-30-109
  source 1..80: mol_type = other DNA
tcaccgttgatcgaattacgtcaacttcatgctgtagcgaaagccgtatctttaacacttgcatcttgagtgctagtgtg

SEQ ID NO: 22739 - DNA, 80 bp, synthetic construct
  misc_feature 1..80: note = Synthetic: >KX512810_3-cand-10-89
  source 1..80: mol_type = other DNA
cacagacaagaagtacagttgtaaagaagttcttaagtctctccagttgattgatgattttgttgtatatgaccctactg

SEQ ID NO: 22740 - DNA, 80 bp, synthetic construct
  misc_feature 1..80: note = Synthetic: >FJ376620_8-cand-430-509
  source 1..80: mol_type = other DNA
cacagcatctgagacaccttcggatgaagagtttcaggacgcagagtgtggtaatgatgatgtttcaactattattactg

SEQ ID NO: 22741 - DNA, 80 bp, synthetic construct
  misc_feature 1..80: note = Synthetic: >MN165107_3-cand-770-849
  source 1..80: mol_type = other DNA
cacagctgggcttccaagatatttccaatttggtaaaagatgagtgtactgattacaacatatatggatttcagggcaca

SEQ ID NO: 22742 - DNA, 80 bp, synthetic construct
  misc_feature 1..80: note = Synthetic: >MN611525_11-cand-450-529
  source 1..80: mol_type = other DNA
caccacttgtgtgcaaggttatcttgctactacacctactgtgcctgctggtaatgttattacatttaaatgtgataatg

SEQ ID NO: 22743 - DNA, 80 bp, synthetic construct
  misc_feature 1..80: note = Synthetic: >FJ376620_13-cand-650-729
  source 1..80: mol_type = other DNA
caccagctattcaggtagctggtgttgattgtgttgttaatggtgtttcttacctcaagacacatgacaatccaccactc

SEQ ID NO: 22744 - DNA, 80 bp, synthetic construct
  misc_feature 1..80: note = Synthetic: >MK472070_9-cand-550-629
  source 1..80: mol_type = other DNA
caccagtggattggcgtagcttctatggttttgatgggtgtgaaatatttcacacgttagaccatagtaactacgctttc

SEQ ID NO: 22745 - DNA, 80 bp, synthetic construct
  misc_feature 1..80: note = Synthetic: >KJ473800_3-cand-50-129
  source 1..80: mol_type = other DNA
gttgttctttacactagaacaggtttaagcactttctatgttcctggtgcagcagaatgggatgttgtttcaattaggtg

SEQ ID NO: 22746 - DNA, 80 bp, synthetic construct
  misc_feature 1..80: note = Synthetic: >FJ376620_13-cand-570-649
  source 1..80: mol_type = other DNA
cacgaagcccattgttgctatcatacaatcaactccatccgttgaagaagatgttagccttctacctgactacaaccaga

SEQ ID NO: 22747 - DNA, 80 bp, synthetic construct
  misc_feature 1..80: note = Synthetic: >GCS_003_15-cand-160-239
  source 1..80: mol_type = other DNA
tatgtgtcatgatgaaagtaacctgtatgctattacagggtctactgttttaaagtttgctacgctccagaaagcgcgtg

SEQ ID NO: 22748 - DNA, 80 bp, synthetic construct
  misc_feature 1..80: note = Synthetic: >KU762338_16-cand-720-799
  source 1..80: mol_type = other DNA
cacgttaggtaaaactacaattggtgagcccgatgacgctcacatgatcctgtcttctttgctctcttacgcgtccgtga

SEQ ID NO: 22749 - DNA, 80 bp, synthetic construct
  misc_feature 1..80: note = Synthetic: >MF593268_3-cand-1030-1109
  source 1..80: mol_type = other DNA
gagcccctacaatcatgcagtataagcgtgaagtttttacgcgttgtaattacaatctctcactcttgctttctctagtg

SEQ ID NO: 22750 - DNA, 80 bp, synthetic construct
  misc_feature 1..80: note = Synthetic: >MH687970_4-cand-170-249
  source 1..80: mol_type = other DNA
gtgccatgtattgctgtacagggcgccttttattatgataatgttactactgtttggcctttgctgccttctggtcagtg

SEQ ID NO: 22751 - DNA, 80 bp, synthetic construct
  misc_feature 1..80: note = Synthetic: >MK472069_12-cand-1280-1359
  source 1..80: mol_type = other DNA
gaacagtttcaaagactttgtgcgtggtttgatcaaacgcacgtctcagttacatgaacttgcaagtgctatgtccagtg

SEQ ID NO: 22752 - DNA, 80 bp, synthetic construct
  misc_feature 1..80: note = Synthetic: >GCS_019_12-cand-1210-1289
  source 1..80: mol_type = other DNA
ttgaagcttgttgaccaagctcctccaattgacaagaaaggcagaatcaaggtgattggcggacaggcattctatttctg

SEQ ID NO: 22753 - DNA, 80 bp, synthetic construct
  misc_feature 1..80: note = Synthetic: >JN183882_3-cand-100-179
  source 1..80: mol_type = other DNA
gtactcatatataaacacacagaaccttaacatacctaatgttcatggtgtttattttgatgtacgtgaacacgactctg

SEQ ID NO: 22754 - DNA, 80 bp, synthetic construct
  misc_feature 1..80: note = Synthetic: >HQ392470_1-cand-260-339
  source 1..80: mol_type = other DNA
cagatgggttttattctgccagtatgcttgttaaaaaggatctacctaaaactttcgtaaccatgccacagttttacaac

SEQ ID NO: 22755 - DNA, 80 bp, synthetic construct
  misc_feature 1..80: note = Synthetic: >MG916903_12-cand-1560-1639
  source 1..80: mol_type = other DNA
tgccactattgctgtttcaccagttagagttgagaagtctcacgtacaactggaagaggcagattttgtgcaacctgctg

SEQ ID NO: 22756 - DNA, 80 bp, synthetic construct
  misc_feature 1..80: note = Synthetic: >MH938448_11-cand-1160-1239
  source 1..80: mol_type = other DNA
ctagtaatcatggaccaatctatgtggaactttctactccgtcaaattcagagtgatttagtaatactgccaagccgctg

SEQ ID NO: 22757 - DNA, 80 bp, synthetic construct
  misc_feature 1..80: note = Synthetic: >MK472068_11-cand-1440-1519
  source 1..80: mol_type = other DNA
caggaacttattgtcgccgtgacagagttcttcgttgacgagctcaaagttgctggaactgcattcaagaagtttggtga

SEQ ID NO: 22758 - DNA, 80 bp, synthetic construct
  misc_feature 1..80: note = Synthetic: >KF636752_9-cand-300-379
  source 1..80: mol_type = other DNA
caggtggtatactatctcttgttattacagtcgtggcctactacatactcaagttgcgtagagcttttggagattaccaa

SEQ ID NO: 22759 - DNA, 80 bp, synthetic construct
  misc_feature 1..80: note = Synthetic: >GCS_003_16-cand-1130-1209
  source 1..80: mol_type = other DNA
caggttcccagctgctgctcagatggcacctacggctgcagcatttctgtttatgtctcactttgacacccgtgaggaga

SEQ ID NO: 22760 - DNA, 80 bp, synthetic construct
  misc_feature 1..80: note = Synthetic: >MK472068_11-cand-2810-2889
  source 1..80: mol_type = other DNA
tactcatgcaatgtcactggactgtgttcacacgatgggtgtgaaaaatgtcaagtggcaactgcagcgtccagaacctg

SEQ ID NO: 22761 - DNA, 80 bp, synthetic construct
  misc_feature 1..80: note = Synthetic: >KX964649_1-cand-270-349
  source 1..80: mol_type = other DNA
tactcagtgtgatcaggtgttaagtgctcttggtttaagtgctatgaaacctgctttgttgaatgcctttgacaatactg

SEQ ID NO: 22762 - DNA, 80 bp, synthetic construct
  misc_feature 1..80: note = Synthetic: >HM245926_11-cand-320-399
  source 1..80: mol_type = other DNA
taaggatttaaagcttaaaggtaaacgcgaagctggtttgaatactgctacttttgcgtctgctatcataggtggcactg

SEQ ID NO: 22763 - DNA, 80 bp, synthetic construct
  misc_feature 1..80: note = Synthetic: >KJ473821_5-cand-220-299
  source 1..80: mol_type = other DNA
cataatttcccaaacgcagaagaccatcaagaaaatttacccagctttcatgcttggaactgctgtgggcaacttttcta

SEQ ID NO: 22764 - DNA, 80 bp, synthetic construct
  misc_feature 1..80: note = Synthetic: >EF065513_7-cand-700-779
  source 1..80: mol_type = other DNA
gcgtgcagctttagaattggaagttaccgttggtaatttgcgtaccttacttgttatggtgcgtacaattatgcagtatg

SEQ ID NO: 22765 - DNA, 80 bp, synthetic construct
  misc_feature 1..80: note = Synthetic: >MG772933_2-cand-390-469
  source 1..80: mol_type = other DNA
catagaggagaccctatgcctaataacggctggactgctttttcagctgcttatttcgtgggctatcttaaaccacgtac

SEQ ID NO: 22766 - DNA, 80 bp, synthetic construct
  misc_feature 1..80: note = Synthetic: >KU762338_16-cand-810-889
  source 1..80: mol_type = other DNA
tagagctataaccactgtttgtgaaaactgtggttcgtctcaggagatcattgagggagtaccggcttgtctacactatg

SEQ ID NO: 22767 - DNA, 80 bp, synthetic construct
  misc_feature 1..80: note = Synthetic: >HM245926_11-cand-380-459
  source 1..80: mol_type = other DNA
tgctatcataggtggcactgcagaggtcaatcctactcggttcgaatattcaactgcaaacctgacacttgtgaatgatg

SEQ ID NO: 22768 - DNA, 80 bp, synthetic construct
  misc_feature 1..80: note = Synthetic: >GCS_003_11-cand-640-719
  source 1..80: mol_type = other DNA
ttgggctgctgctgtagagtttcaagagaagaaccacaacgtggaggaagtagttggaggtccgtacccctcaggggatg

SEQ ID NO: 22769 - DNA, 80 bp, synthetic construct
  misc_feature 1..80: note = Synthetic: >GCS_019_12-cand-510-589
  source 1..80: mol_type = other DNA
cgacaatgtccatttgtggcgtgtcattgcagttcagagttctgatggttttgttgcatcctcaacatatgatgaggatg

SEQ ID NO: 22770 - DNA, 80 bp, synthetic construct
  misc_feature 1..80: note = Synthetic: >KU762338_17-cand-1440-1519
  source 1..80: mol_type = other DNA
cgttgttgaggacgtcaccgttgtagaagacgttcgtgatgaaaatggcctcacagacgacgactggctaggcgcagatg

SEQ ID NO: 22771 - DNA, 80 bp, synthetic construct
  misc_feature 1..80: note = Synthetic: >FJ376619_8-cand-270-349
  source 1..80: mol_type = other DNA
cgcgttttaccgtcgtctaacacattaattcgcacaatcaaaggtttgttctattcatttagaactatactttttgcatg

SEQ ID NO: 22772 - DNA, 80 bp, synthetic construct
  misc_feature 1..80: note = Synthetic: >GCS_003_12-cand-440-519
  source 1..80: mol_type = other DNA
cgccagctaaaaatagctgctcgcaagacagggttgagcttacagcttacgacctctaacttgaaagcagatgttgcatg

SEQ ID NO: 22773 - DNA, 80 bp, synthetic construct
  misc_feature 1..80: note = Synthetic: >KY073746_6-cand-200-279
  source 1..80: mol_type = other DNA
gtgttgcaccacttgttaaacaatgctacgaagctctaagcaccattaaaggggctttaggcgatgtcgcagaatgcatg

SEQ ID NO: 22774 - DNA, 80 bp, synthetic construct
  misc_feature 1..80: note = Synthetic: >KX512809_16-cand-160-239
  source 1..80: mol_type = other DNA
catggtaagagtgttacaacacgtgtaactagcgtccaagggtctgttgtgttgacatctacttgtggtgttgttaacaa

SEQ ID NO: 22775 - DNA, 80 bp, synthetic construct
  misc_feature 1..80: note = Synthetic: >KU762338_14-cand-630-709
  source 1..80: mol_type = other DNA
ctgctcgacttagtactatgtgctatgctggggtgacgctagatatttttaaactaaacaccacccacttgtccaacatg

SEQ ID NO: 22776 - DNA, 80 bp, synthetic construct
  misc_feature 1..80: note = Synthetic: >MK472068_8-cand-20-99
  source 1..80: mol_type = other DNA
catgtttttgctacacagaggctgaagctgatggtatcaaacaacatgttattaaaaatacaccggctgcagtaccagaa

SEQ ID NO: 22777 - DNA, 80 bp, synthetic construct
  misc_feature 1..80: note = Synthetic: >FJ376619_12-cand-1200-1279
  source 1..80: mol_type = other DNA
cattactcttgatcttgctgttagcattaataaaatgcgtatcacatatacagcaggacatcttgtagttgatgcttcca

SEQ ID NO: 22778 - DNA, 80 bp, synthetic construct
  misc_feature 1..80: note = Synthetic: >MK472068_11-cand-1520-1599
  source 1..80: mol_type = other DNA
ttatgtactctttgacaatgcgctttgccggttggttagtgcgaaaatcaagggtgcaaaacaacatggtctcaagaatg

SEQ ID NO: 22779 - DNA, 80 bp, synthetic construct
  misc_feature 1..80: note = Synthetic: >MK211373_9-cand-90-169
  source 1..80: mol_type = other DNA
tgtttatctttccaatcatgcatgtagtcctgctaatgacgaagaagttgctatcagctttaggttctcgctcctcaatg

SEQ ID NO: 22780 - DNA, 80 bp, synthetic construct
  misc_feature 1..80: note = Synthetic: >FJ376620_7-cand-270-349
  source 1..80: mol_type = other DNA
cattgctgcctctacattttattattcaactaatgctactaatctaacatgcacagaaccagtcctctcttatggaccag

SEQ ID NO: 22781 - DNA, 80 bp, synthetic construct
  misc_feature 1..80: note = Synthetic: >MH938449_13-cand-0-79
  source 1..80: mol_type = other DNA
tagatcgcgatctcagagcagtaaccgctcacaaaatccacgctcgcagagccgaggcagacagcctaatcaagccaatg

SEQ ID NO: 22782 - DNA, 80 bp, synthetic construct
  misc_feature 1..80: note = Synthetic: >FJ376621_2-cand-30-109
  source 1..80: mol_type = other DNA
catttaggacaattatatttgcatgtgcgccattcttattattaccagcggttgctagtattttgtcatctagctaccag

SEQ ID NO: 22783 - DNA, 80 bp, synthetic construct
  misc_feature 1..80: note = Synthetic: >EF065513_3-cand-240-319
  source 1..80: mol_type = other DNA
catttgaagcttttagagattttgtccgtactgaagaagagcgctttgctcagtttttcggtaaagtgtgtgcacctata

SEQ ID NO: 22784 - DNA, 80 bp, synthetic construct
  misc_feature 1..80: note = Synthetic: >FJ376620_8-cand-70-149
  source 1..80: mol_type = other DNA
tgttcccaatttagacactattcttacaaaaattaaaaagaatgaaccctgcgttgaagtacaacaaggtgttcaaaatg

SEQ ID NO: 22785 - DNA, 80 bp, synthetic construct
  misc_feature 1..80: note = Synthetic: >KJ473807_11-cand-100-179
  source 1..80: mol_type = other DNA
ccaaaattcaaatgactctgccgtagacattgttgcagctgttaaacaggcacttaaagagcttggtgtaacaaatgaaa

SEQ ID NO: 22786 - DNA, 80 bp, synthetic construct
  misc_feature 1..80: note = Synthetic: >MH687970_1-cand-30-109
  source 1..80: mol_type = other DNA
tattaagaatcgggctgcccttatgtctaatctctccataactggagaaggccatgtacctttcttgcttgatggtttgg

SEQ ID NO: 22787 - DNA, 80 bp, synthetic construct
  misc_feature 1..80: note = Synthetic: >FJ938057_4-cand-250-329
  source 1..80: mol_type = other DNA
ccaaaggcacagccgggttttcaggacatytctaatgttgttaaaggtgtatgtacagattataatatatatggctttca

SEQ ID NO: 22788 - DNA, 80 bp, synthetic construct
  misc_feature 1..80: note = Synthetic: >GCS_019_10-cand-1160-1239
  source 1..80: mol_type = other DNA
tgttacttttcttctaattgtttactacatttccctgcaggaccaaatagtgcaggctgctgctcaacaggcgtggttgg

SEQ ID NO: 22789 - DNA, 80 bp, synthetic construct
  misc_feature 1..80: note = Synthetic: >MG916902_8-cand-150-229
  source 1..80: mol_type = other DNA
ccaagctatagatgcccttttggcacagttgtatagctcggctttctataggcagttaatgtaatacctttggtattttc

SEQ ID NO: 22790 - DNA, 80 bp, synthetic construct
  misc_feature 1..80: note = Synthetic: >MK472068_10-cand-2110-2189
  source 1..80: mol_type = other DNA
ccacacccaacaacacaatgttcaactacacgattgccacacctatgttttactattcttcgaatagtcaagctaactgc

SEQ ID NO: 22791 - DNA, 80 bp, synthetic construct
  misc_feature 1..80: note = Synthetic: >MK472068_11-cand-320-399
  source 1..80: mol_type = other DNA
gttggtgttctccaattgtccttcaaatggttttgtcaacattagcctttctggttttgctggcaaccctgtcaatgtgg

SEQ ID NO: 22792 - DNA, 80 bp, synthetic construct
  misc_feature 1..80: note = Synthetic: >JQ989271_3-cand-270-349
  source 1..80: mol_type = other DNA
tgggtgttacttggagttctgattacgttcgtatttatgggcttcaaagtacctatcgtttttattttcctaataagtgg

SEQ ID NO: 22793 - DNA, 80 bp, synthetic construct
  misc_feature 1..80: note = Synthetic: >MG021451_3-cand-220-299
  source 1..80: mol_type = other DNA
ccagaaaaccattaaaaagatttacccagcttttatgctcggttcttcagtaggaaactactataatggttatcctgggc

SEQ ID NO: 22794 - DNA, 80 bp, synthetic construct
  misc_feature 1..80: note = Synthetic: >MH938450_5-cand-100-179
  source 1..80: mol_type = other DNA
ccagtgggagtttgtttcacaccctttgttaagtagtttaatgccagcatgttatatgttgtttctactgtgttttggta

SEQ ID NO: 22795 - DNA, 80 bp, synthetic construct
  misc_feature 1..80: note = Synthetic: >MN611525_9-cand-0-79
  source 1..80: mol_type = other DNA
ttgccgtaccatgctactcatactactattgagttaaatgtcaccatgcaatttactggccatagcattacacttaatgg

SEQ ID NO: 22796 - DNA, 80 bp, synthetic construct
  misc_feature 1..80: note = Synthetic: >KU762338_17-cand-640-719
  source 1..80: mol_type = other DNA
tactacactgggactggtcgctatgccgatcttcggtttggcacccgtcaaccagacattttgtgggttgggcggaatgg

SEQ ID NO: 22797 - DNA, 80 bp, synthetic construct
  misc_feature 1..80: note = Synthetic: >MH687940_3-cand-900-979
  source 1..80: mol_type = other DNA
cccaagctgttgcagatgccgacaatgactgtggtgatgtagtggagactgtcgaagcaaagtctaatgagcagcttgaa

SEQ ID NO: 22798 - DNA, 80 bp, synthetic construct
  misc_feature 1..80: note = Synthetic: >GCS_003_15-cand-1920-1999
  source 1..80: mol_type = other DNA
cgctgatcttgagctatggactatccctaaaatcggcgtgtgcggtcaagtgcgcaaccaagaagacgttgcggtatggg

SEQ ID NO: 22799 - DNA, 80 bp, synthetic construct
  misc_feature 1..80: note = Synthetic: >MK472069_12-cand-2490-2569
  source 1..80: mol_type = other DNA
cttttgcgtggtgtaaacacttgcaaaattgtctgtgacgcttcttgtgattgtggtgattcagattacgtaatggaggg

SEQ ID NO: 22800 - DNA, 80 bp, synthetic construct
  misc_feature 1..80: note = Synthetic: >MK472071_3-cand-0-79
  source 1..80: mol_type = other DNA
tggtctgagttactctcctattcaacaatgttctgggtgagtgctaatttcataacacccctatttgccatttttgtcgg

SEQ ID NO: 22801 - DNA, 80 bp, synthetic construct
  misc_feature 1..80: note = Synthetic: >KU762338_16-cand-1370-1449
  source 1..80: mol_type = other DNA
ccgaccaggctagtgagctagctgaggcatttaacaaggctataaacgcaagtagtgacggacctaaacgtagcctgacc

SEQ ID NO: 22802 - DNA, 80 bp, synthetic construct
  misc_feature 1..80: note = Synthetic: >EU420137_4-cand-250-329
  source 1..80: mol_type = other DNA
ccgttaaacaacttcctgttatggctagtgaagtgttgaaattctttaacaacctcagccaagtactgattgttgttaga

SEQ ID NO: 22803 - DNA, 80 bp, synthetic construct
  misc_feature 1..80: note = Synthetic: >MK472068_10-cand-330-409
  source 1..80: mol_type = other DNA
tttagtgttgacaacactggtgttgattgcctttttgatcagaccattcaaatcagcagacagccttattctgtcgtagg

SEQ ID NO: 22804 - DNA, 80 bp, synthetic construct
  misc_feature 1..80: note = Synthetic: >FJ376620_6-cand-40-119
  source 1..80: mol_type = other DNA
tttataactaactatcagttacaaggtcttggtgttgaacatataatttatggcgatgatactactcctgttataggagg

SEQ ID NO: 22805 - DNA, 80 bp, synthetic construct
  misc_feature 1..80: note = Synthetic: >HM245926_7-cand-40-119
  source 1..80: mol_type = other DNA
tattaccggtaatgtcaacctcaaagctgagcgtggcagaccctataataatggtggtaatgccactttaagctttcagg

SEQ ID NO: 22806 - DNA, 80 bp, synthetic construct
  misc_feature 1..80: note = Synthetic: >FJ376622_11-cand-770-849
  source 1..80: mol_type = other DNA
cctgccattgatcaactctacaaagagtttcttaatggcaatcctagtagacttgtagcttgggtctatgcggcaactaa

SEQ ID NO: 22807 - DNA, 80 bp, synthetic construct
  misc_feature 1..80: note = Synthetic: >HQ392470_1-cand-170-249
  source 1..80: mol_type = other DNA
ttgatgttaatggcacaggcattactaggttgttctattgtgactcacccctcaatagaattaagtgtcagcaattaagg

SEQ ID NO: 22808 - DNA, 80 bp, synthetic construct
  misc_feature 1..80: note = Synthetic: >GCS_003_16-cand-890-969
  source 1..80: mol_type = other DNA
gatggcttatttggtccaaaagctgcaggctttagagtctaaagtggatggcaaaaagcctgagaagacacctcagaagg

SEQ ID NO: 22809 - DNA, 80 bp, synthetic construct
  misc_feature 1..80: note = Synthetic: >MH938450_10-cand-180-259
  source 1..80: mol_type = other DNA
gcttacctagatggggctattattgcttccattttaattgtcaggctttgttacactgctttttacagtattaaatttcg

SEQ ID NO: 22810 - DNA, 80 bp, synthetic construct
  misc_feature 1..80: note = Synthetic: >GCS_003_16-cand-2440-2519
  source 1..80: mol_type = other DNA
cgaactatgcgtctcctactgcttttagcactggtttctgcagctagttcgctaaccttcaaatttaattttcagtacca

SEQ ID NO: 22811 - DNA, 80 bp, synthetic construct
  misc_feature 1..80: note = Synthetic: >JQ065044_7-cand-0-79
  source 1..80: mol_type = other DNA
cgacaccagtctcatttaaattaaaggaatggtagcggatgactggtccattaccatacccggtcaatatgtaatagcag

SEQ ID NO: 22812 - DNA, 80 bp, synthetic construct
  misc_feature 1..80: note = Synthetic: >SBB_797_4-cand-90-169
  source 1..80: mol_type = other DNA
tggggcgctcgttatgttgtcttaactgttctgtctagaggttttggtgtaacgccactggacgttcccagtatatgtcg

SEQ ID NO: 22813 - DNA, 80 bp, synthetic construct
  misc_feature 1..80: note = Synthetic: >GCS_003_16-cand-2920-2999
  source 1..80: mol_type = other DNA
ctgtctacaacaccagattgcagcctggttgtgcaacccctggttagtgagacacgttatgtttccaaacctgagggtcg

SEQ ID NO: 22814 - DNA, 80 bp, synthetic construct
  misc_feature 1..80: note = Synthetic: >GCS_003_13-cand-880-959
  source 1..80: mol_type = other DNA
cgactacgtggaggtggcaaacctaaggtttcctttggtgaggaagaggtgcgcacagtaccgcgtgttttgactgtaaa

SEQ ID NO: 22815 - DNA, 80 bp, synthetic construct
  misc_feature 1..80: note = Synthetic: >JN183882_2-cand-210-289
  source 1..80: mol_type = other DNA
gccttaacttgctaacacaatacacttcagcttgtcagacaattgagaattcccttaacctcggtgcgcgtcttgaatcg

SEQ ID NO: 22816 - DNA, 80 bp, synthetic construct
  misc_feature 1..80: note = Synthetic: >KY073745_8-cand-180-259
  source 1..80: mol_type = other DNA
ttgatgcagttaaaactgttttggcttcacgaaagagtgctgtgtctgaagaggttgtgccgcctgctgataaacctgcg

SEQ ID NO: 22817 - DNA, 80 bp, synthetic construct
  misc_feature 1..80: note = Synthetic: >MH938449_13-cand-350-429
  source 1..80: mol_type = other DNA
cgcattcacaagaaagtgtcgacaaatgtttcggacctcgttccacttcaatgaactttggtgatgctcagctagtcaga

SEQ ID NO: 22818 - DNA, 80 bp, synthetic construct
  misc_feature 1..80: note = Synthetic: >JQ065048_12-cand-540-619
  source 1..80: mol_type = other DNA
cgccagagcaaatagatacattcttagattcattattggataacccagtagttttacaagtagtctctgacagtgctata

SEQ ID NO: 22819 - DNA, 80 bp, synthetic construct
  misc_feature 1..80: note = Synthetic: >KU762338_9-cand-390-469
  source 1..80: mol_type = other DNA
gcgttgtcctatggttgtaggtgttgtcaaagagctggttggtgttttaaaaccagacttacctgtgcgatttgtgcgcg

SEQ ID NO: 22820 - DNA, 80 bp, synthetic construct
  misc_feature 1..80: note = Synthetic: >GCS_003_9-cand-0-79
  source 1..80: mol_type = other DNA
cgcgtgcgtaagccatacttgaagctgctagctactctagctttgtgtatattgcaggcaagtgtactcgcatggttagc

SEQ ID NO: 22821 - DNA, 80 bp, synthetic construct
  misc_feature 1..80: note = Synthetic: >MK472069_11-cand-350-429
  source 1..80: mol_type = other DNA
cgctcaaaatcacctgctcccaagagtgctcctgaacagatgggtaagcccgtttggaaaagaacacctcactcacagga

SEQ ID NO: 22822 - DNA, 80 bp, synthetic construct
  misc_feature 1..80: note = Synthetic: >DQ071615_1-cand-120-199
  source 1..80: mol_type = other DNA
cgctgctactgaaaagtctaatgtaattaggggctggatttttggttccactttcgataacacaacccagtcagctgtta

SEQ ID NO: 22823 - DNA, 80 bp, synthetic construct
  misc_feature 1..80: note = Synthetic: >JN183882_3-cand-0-79
  source 1..80: mol_type = other DNA
cggagactattcttggtggttatttaccatattgtggtgaaggtgctaattgtggctggtacaattttgttttcaataga

SEQ ID NO: 22824 - DNA, 80 bp, synthetic construct
  misc_feature 1..80: note = Synthetic: >MG916903_8-cand-310-389
  source 1..80: mol_type = other DNA
gagcaccagggtaatcaagtgcttggcgttacttggtcttctaattatgtcactttttatggtattagtaaatcataccg

SEQ ID NO: 22825 - DNA, 80 bp, synthetic construct
  misc_feature 1..80: note = Synthetic: >KY073746_10-cand-230-309
  source 1..80: mol_type = other DNA
gctattatgcttatgtgtataaaaattgggcctttgtcactttcaacactcacgtgctttgctttgtcgtgggcaaaccg

SEQ ID NO: 22826 - DNA, 80 bp, synthetic construct
  misc_feature 1..80: note = Synthetic: >MG916903_7-cand-190-269
  source 1..80: mol_type = other DNA
cgtcctgtagctcatcctgctaatgctcttattaagggcgagtcttacacgacttatgcgggtgatgttaaggatggtca

SEQ ID NO: 22827 - DNA, 80 bp, synthetic construct
  misc_feature 1..80: note = Synthetic: >MK472068_11-cand-0-79
  source 1..80: mol_type = other DNA
cgtctgtgcaggtgtgtggatatcaagttccgtcttggttgaaaccgattactccaagccatgtcaagcagtcctgttcc

SEQ ID NO: 22828 - DNA, 80 bp, synthetic construct
  misc_feature 1..80: note = Synthetic: >HQ012367_2-cand-1000-1079
  source 1..80: mol_type = other DNA
gaaatagttggcgctataacagctgtcaatcaaacggatctatttgagtttgtaaatcgcacacaatcaagaagatcacg

SEQ ID NO: 22829 - DNA, 80 bp, synthetic construct
  misc_feature 1..80: note = Synthetic: >KJ473798_5-cand-660-739
  source 1..80: mol_type = other DNA
cgttgttgttaaggatcgtcttgtcggtgttatgtcttcgaccagcactgtttcgattccttttaacaacaccattccta

SEQ ID NO: 22830 - DNA, 80 bp, synthetic construct
  misc_feature 1..80: note = Synthetic: >KY073744_7-cand-20-99
  source 1..80: mol_type = other DNA
ctaaacttatgtcttcactgcaattcgttattagagttgtagtggcagtttgcataattactcttgcttctggtatgcaa

SEQ ID NO: 22831 - DNA, 80 bp, synthetic construct
  misc_feature 1..80: note = Synthetic: >MK492263_7-cand-690-769
  source 1..80: mol_type = other DNA
gtttgaacgaacatgaatgttttagcaactttatgttttctatctctcttctctccacttttagggcaatttgcctttag

SEQ ID NO: 22832 - DNA, 80 bp, synthetic construct
  misc_feature 1..80: note = Synthetic: >KU762338_9-cand-120-199
  source 1..80: mol_type = other DNA
tacaccatttaaagtagttggtggaaacaaacgcgttataccgtggcgcagcattcttgtgcacgtgcttatgttgttag

SEQ ID NO: 22833 - DNA, 80 bp, synthetic construct
  misc_feature 1..80: note = Synthetic: >GCS_003_14-cand-1680-1759
  source 1..80: mol_type = other DNA
ctaattgcatgggtgttgttgttatagggttaacaccagcatctggttctaacctcgtgtgtccaaaggctaacgataca

SEQ ID NO: 22834 - DNA, 80 bp, synthetic construct
  misc_feature 1..80: note = Synthetic: >KU762338_15-cand-800-879
  source 1..80: mol_type = other DNA
ctagtaaggtatttgtccgcaccgatgatggattgctgttccgctacgtaaagtccggcggtgtctttttgaaggcattc

SEQ ID NO: 22835 - DNA, 80 bp, synthetic construct
  misc_feature 1..80: note = Synthetic: >FJ376622_5-cand-0-79
  source 1..80: mol_type = other DNA
ctattaatgagcttttagctggttatgagcttaacaatttagtggcaccaagcgactcaactccaagggacattgctcgc

SEQ ID NO: 22836 - DNA, 80 bp, synthetic construct
  misc_feature 1..80: note = Synthetic: >MF593268_3-cand-950-1029
  source 1..80: mol_type = other DNA
ctattcggccaaacctgtaggcgcatattatgaggctcatgtttaccccgattgcaattttactgaattgtttagggaaa

SEQ ID NO: 22837 - DNA, 80 bp, synthetic construct
  misc_feature 1..80: note = Synthetic: >KJ473810_3-cand-240-319
  source 1..80: mol_type = other DNA
ctccaataatgatttgtctctttatccagtcacatctgtggttgttagtaataaagttattgaatttgagaagccagcta

SEQ ID NO: 22838 - DNA, 80 bp, synthetic construct
  misc_feature 1..80: note = Synthetic: >MH687970_3-cand-0-79
  source 1..80: mol_type = other DNA
taccagttgtttatggttaccccaacaggtgtttgtttgggcaatggtctttttataggttggtttgtacctatggcgag

SEQ ID NO: 22839 - DNA, 80 bp, synthetic construct
  misc_feature 1..80: note = Synthetic: >MK472067_10-cand-240-319
  source 1..80: mol_type = other DNA
ctgaaactattgttaaagtccttactaaggccgttggtactagagttaaaattaatggtggctgggaccaactgttagag

SEQ ID NO: 22840 - DNA, 80 bp, synthetic construct
  misc_feature 1..80: note = Synthetic: >KU762338_13-cand-790-869
  source 1..80: mol_type = other DNA
ctctcctaacctcaaggagaatgtagaagaggaagtagcagcttgtatgcgctttctgctaaggagagtaacgaagtcgc

SEQ ID NO: 22841 - DNA, 80 bp, synthetic construct
  misc_feature 1..80: note = Synthetic: >MG916901_12-cand-90-169
  source 1..80: mol_type = other DNA
ctctgtattgttaatcgaaagttccgctttcaattctcacatgctgctggacaggtaattggtgttacctggtcctctaa

SEQ ID NO: 22842 - DNA, 80 bp, synthetic construct
  misc_feature 1..80: note = Synthetic: >KX512809_14-cand-680-759
  source 1..80: mol_type = other DNA
ctctgtgttcgtgtacacagaagaggagcagagtaaagttttacagtactttgagacacccgtcacagttcttttagaag

SEQ ID NO: 22843 - DNA, 80 bp, synthetic construct
  misc_feature 1..80: note = Synthetic: >KF636752_7-cand-0-79
  source 1..80: mol_type = other DNA
ctgaagtgaaattactccgtaacataggtgttgacatatgtaacggattcacactttgggactatgagcaacaagctcca

SEQ ID NO: 22844 - DNA, 80 bp, synthetic construct
  misc_feature 1..80: note = Synthetic: >FJ376620_9-cand-410-489
  source 1..80: mol_type = other DNA
tgtgtatgtttatgcaaagacaggcattccttgctatggcaatagtacagatcattatgactatcaatcattttgtgcag

SEQ ID NO: 22845 - DNA, 80 bp, synthetic construct
  misc_feature 1..80: note = Synthetic: >MK472068_11-cand-2570-2649
  source 1..80: mol_type = other DNA
ctgtgtattcagctttttccctacgtcagaaccttttgagagatattgcaaaaagtgtggtatgaaccgcttttgcacta

SEQ ID NO: 22846 - DNA, 80 bp, synthetic construct
  misc_feature 1..80: note = Synthetic: >FJ938054_4-cand-100-179
  source 1..80: mol_type = other DNA
ctgtgttttgatgtaagcccagctgttgcaggttgtaagtggtcgttagttcatgacgttaaatggcgcacacagtttgc

SEQ ID NO: 22847 - DNA, 80 bp, synthetic construct
  misc_feature 1..80: note = Synthetic: >HM245925_12-cand-3400-3479
  source 1..80: mol_type = other DNA
ctgttgatgcatcagctactattggtgttcaattaggttccagtgttgttttgaacgatcaggattattccaaatgtgta

SEQ ID NO: 22848 - DNA, 80 bp, synthetic construct
  misc_feature 1..80: note = Synthetic: >FJ376619_8-cand-180-259
  source 1..80: mol_type = other DNA
cttacacgcatttatgactacctgtgtagcataggtgctattgacactacagctaaactttctataagtttagcatataa

SEQ ID NO: 22849 - DNA, 80 bp, synthetic construct
  misc_feature 1..80: note = Synthetic: >MH938449_13-cand-960-1039
  source 1..80: mol_type = other DNA
cttctgacattccgctgcaaacaagatgcagtgctggagacaaaggggatgtacatgaaccttgtacgcacctttgaaac

SEQ ID NO: 22850 - DNA, 80 bp, synthetic construct
  misc_feature 1..80: note = Synthetic: >KY073746_12-cand-1730-1809
  source 1..80: mol_type = other DNA
ttactaaaaatgctggtggaaagataacattctcagatgaggttgtggtacatgacattgaaccaacacacaaagtcaag

SEQ ID NO: 22851 - DNA, 80 bp, synthetic construct
  misc_feature 1..80: note = Synthetic: >KY073747_2-cand-170-249
  source 1..80: mol_type = other DNA
ctttctattgttgaagatccagattcacgtgccacttctaggtcccagtcacgttctcagagtagagatcgtggtaaaaa

SEQ ID NO: 22852 - DNA, 80 bp, synthetic construct
  misc_feature 1..80: note = Synthetic: >MG916902_10-cand-940-1019
  source 1..80: mol_type = other DNA
gaaagtagagtggaaatacaacaacacacacctaatttgttcagatggtgaggtttatgaacaatttaataccactgtta

SEQ ID NO: 22853 - DNA, 80 bp, synthetic construct
  misc_feature 1..80: note = Synthetic: >HM245926_11-cand-780-859
  source 1..80: mol_type = other DNA
gaaccattctgtcgtaaatataaaatgccaaggtgtcttaaagaacatactggtctttgggatatcattcggtctagtgc

SEQ ID NO: 22854 - DNA, 80 bp, synthetic construct
  misc_feature 1..80: note = Synthetic: >MG916903_6-cand-60-139
  source 1..80: mol_type = other DNA
ttgacttttacgatgtgaaggttagtgacattcctgctatgaagccggacagacttgttatatttacagactcagacttc

SEQ ID NO: 22855 - DNA, 80 bp, synthetic construct
  misc_feature 1..80: note = Synthetic: >MK211373_6-cand-150-229
  source 1..80: mol_type = other DNA
ttgacttttatgatgtgaaggttagtgacatccctgcgctgaaacctgacaagcttgtcatatttacagatccagacttc

SEQ ID NO: 22856 - DNA, 80 bp, synthetic construct
  misc_feature 1..80: note = Synthetic: >HQ392470_1-cand-820-899
  source 1..80: mol_type = other DNA
tacaacatatatggatttcagggtactggtattatcagaaacactacctctagattagttgcaggcctttattacacttc

SEQ ID NO: 22857 - DNA, 80 bp, synthetic construct
  misc_feature 1..80: note = Synthetic: >MH532440_1-cand-620-699
  source 1..80: mol_type = other DNA
gaatctgaattacagttgcacaacggtattgcatttcgatcaccgactggtgagctgtatgctttcaagaatgtgactac

SEQ ID NO: 22858 - DNA, 80 bp, synthetic construct
  misc_feature 1..80: note = Synthetic: >KX512810_11-cand-220-299
  source 1..80: mol_type = other DNA
gacatctacttgtggtgttattagcaatagtataaggggtgatggttacgtgtgttttaatggttctgccagtagtggac

SEQ ID NO: 22859 - DNA, 80 bp, synthetic construct
  misc_feature 1..80: note = Synthetic: >GCS_017_2-cand-0-79
  source 1..80: mol_type = other DNA
tgctggtaccgcgcagttaacaaatgtacatggtgtatttgttgggtattattcacatggcatgcgtagctattttggtc

SEQ ID NO: 22860 - DNA, 80 bp, synthetic construct
  misc_feature 1..80: note = Synthetic: >FJ376620_3-cand-40-119
  source 1..80: mol_type = other DNA
gacccttttaattccagaggaagaacacttcagcgtggagctaacactaggtccatgtctgttgatgccagaccaaacaa

SEQ ID NO: 22861 - DNA, 80 bp, synthetic construct
  misc_feature 1..80: note = Synthetic: >JX993987_1-cand-40-119
  source 1..80: mol_type = other DNA
gcacaaaatactatagtctactttgacaatcatgtaatacctttctacgacggtatttactttgctgccacagagcggtc

SEQ ID NO: 22862 - DNA, 80 bp, synthetic construct
  misc_feature 1..80: note = Synthetic: >GCS_003_13-cand-310-389
  source 1..80: mol_type = other DNA
gaccttgtgaaacctgtattggattggattgttgaaaagatggtccttgcacgtgacagtgttgttagctgtgctgaggc

SEQ ID NO: 22863 - DNA, 80 bp, synthetic construct
  misc_feature 1..80: note = Synthetic: >HM245925_6-cand-130-209
  source 1..80: mol_type = other DNA
taaacagactgctcttaatgttcagtctataatatatcttatggatgtagaccataagattgttaatggcgccactcgtc

SEQ ID NO: 22864 - DNA, 80 bp, synthetic construct
  misc_feature 1..80: note = Synthetic: >GCS_003_11-cand-550-629
  source 1..80: mol_type = other DNA
gcaagatctagaacccgccccattggcaaggaaagaggcctgtgtggtagcggttagcaatgatgcgcagcaagagagtc

SEQ ID NO: 22865 - DNA, 80 bp, synthetic construct
  misc_feature 1..80: note = Synthetic: >KY073746_6-cand-400-479
  source 1..80: mol_type = other DNA
tttccgtatggtggctgttctaattgtagaaaagccattatgcatacaatacggtctataaagggcactggtgttttctc

SEQ ID NO: 22866 - DNA, 80 bp, synthetic construct
  misc_feature 1..80: note = Synthetic: >JQ989271_3-cand-0-79
  source 1..80: mol_type = other DNA
ttacaggttataaaggtgtgtttgtatcgtaccacagttttggtatgccttggtctattggtgtttccaattctgatctc

SEQ ID NO: 22867 - DNA, 80 bp, synthetic construct
  misc_feature 1..80: note = Synthetic: >MH938449_10-cand-270-349
  source 1..80: mol_type = other DNA
tggcttgtaaaaattggaaacctaggtgttgagctttggaatagattcaaggcttttgccaaggaacgttttataagctc

SEQ ID NO: 22868 - DNA, 80 bp, synthetic construct
  misc_feature 1..80: note = Synthetic: >JX993988_1-cand-120-199
  source 1..80: mol_type = other DNA
tcgctgcaactgaaaagtctaatgttattagaggttggatttttggctctactatggacaatagtacgcagtcagctatc

SEQ ID NO: 22869 - DNA, 80 bp, synthetic construct
  misc_feature 1..80: note = Synthetic: >MF593268_3-cand-1530-1609
  source 1..80: mol_type = other DNA
gatccactagatatggtctatgttattacagttaaatatgaaccaggagcagaaactgtttgtcccaaacagatacgccc

SEQ ID NO: 22870 - DNA, 80 bp, synthetic construct
  misc_feature 1..80: note = Synthetic: >MH938449_13-cand-80-159
  source 1..80: mol_type = other DNA
gatctaacaacaatggtggccgaggcaaccagcagcgtaatagatccaattcacggaaccgtggtaattccaaccagaac

SEQ ID NO: 22871 - DNA, 80 bp, synthetic construct
  misc_feature 1..80: note = Synthetic: >MK472069_11-cand-1010-1089
  source 1..80: mol_type = other DNA
gatgcccttgatactactaagggtgtgtaccttaatctggtacgcactacacctctccctaatggagaacttttcacaga

SEQ ID NO: 22872 - DNA, 80 bp, synthetic construct
  misc_feature 1..80: note = Synthetic: >FJ376622_8-cand-0-79
  source 1..80: mol_type = other DNA
gatggagcactaacactcacctttacctattctatcactgtcaagcaggactcgcctgactatgatagactcaaagatgc

SEQ ID NO: 22873 - DNA, 80 bp, synthetic construct
  misc_feature 1..80: note = Synthetic: >KU762338_16-cand-890-969
  source 1..80: mol_type = other DNA
gcactgtacaattggatgatttgtacaaaccagaaagtatagtctgcccgtgtggaaaagcagctatacggtttgtttcc

SEQ ID NO: 22874 - DNA, 80 bp, synthetic construct
  misc_feature 1..80: note = Synthetic: >KU762338_17-cand-1770-1849
  source 1..80: mol_type = other DNA
gcagctatcgttggacttctgctgctggtctgtctgttttactgctgttatctaaagttcaaggcctcccaagcgaagaa

SEQ ID NO: 22875 - DNA, 80 bp, synthetic construct
  misc_feature 1..80: note = Synthetic: >MG916902_10-cand-630-709
  source 1..80: mol_type = other DNA
gcatagtcactctttcaaccccactaaatacaagtgtgaaaacaacacgttatctgttttgtgtttgctggatacaaaca

SEQ ID NO: 22876 - DNA, 80 bp, synthetic construct
  misc_feature 1..80: note = Synthetic: >KJ473807_12-cand-0-79
  source 1..80: mol_type = other DNA
gttacaaacttgggttattaaatggaaatttcacggacgatgttcgtgttgcagccagagatggtacaattgtcgttggc

SEQ ID NO: 22877 - DNA, 80 bp, synthetic construct
  misc_feature 1..80: note = Synthetic: >MG916903_3-cand-80-159
  source 1..80: mol_type = other DNA
gcttctgcacttgttcagttacagctattgggttgttatgagagtgatgcttttgatctttttaaagttggaagggtggc

SEQ ID NO: 22878 - DNA, 80 bp, synthetic construct
  misc_feature 1..80: note = Synthetic: >KU762338_14-cand-740-819
  source 1..80: mol_type = other DNA
tacaattatgccttgcctagcaacttttatggttgcgtgcatgcttatcatcttaatagtactactccatatgcagtggc

SEQ ID NO: 22879 - DNA, 80 bp, synthetic construct
  misc_feature 1..80: note = Synthetic: >GCS_003_16-cand-160-239
  source 1..80: mol_type = other DNA
taattttgctctatctttcctttctttttcttcttggaaacgaacctatcatgtctggcaggaacacccctaagggtcgc

SEQ ID NO: 22880 - DNA, 80 bp, synthetic construct
  misc_feature 1..80: note = Synthetic: >KY073746_2-cand-40-119
  source 1..80: mol_type = other DNA
gcgtgtttttggcgatatgtcgttgggtgtgtgtacagtcgtttgtgcaacagtggtaaacaatttgtcatacgttgtta

SEQ ID NO: 22881 - DNA, 80 bp, synthetic construct
  misc_feature 1..80: note = Synthetic: >MK907286_3-cand-110-189
  source 1..80: mol_type = other DNA
gctaggacatttattgagacttgtctaggcgctgcaaacttcacacttaaagtcctttgtgaattagttaaccttgtaaa

SEQ ID NO: 22882 - DNA, 80 bp, synthetic construct
  misc_feature 1..80: note = Synthetic: >FJ938053_3-cand-0-79
  source 1..80: mol_type = other DNA
gctgttaaaatttgccattggaagccaggtaacataagtacttaccatcaatttgatgtaaatctaggagatggtggtca

SEQ ID NO: 22883 - DNA, 80 bp, synthetic construct
  misc_feature 1..80: note = Synthetic: >MG762674_6-cand-710-789
  source 1..80: mol_type = other DNA
tgctgctcaatatagcggttttaatacgctattgtatggtctgtctgttatatctcttacacccgcatctggtaataagc

SEQ ID NO: 22884 - DNA, 80 bp, synthetic construct
  misc_feature 1..80: note = Synthetic: >KM347965_6-cand-30-109
  source 1..80: mol_type = other DNA
gcttctgtctatcgtaaattggcgaaggttgaaggtcctatgttaacacctcttattagttgtggcatttttggtgtacc

SEQ ID NO: 22885 - DNA, 80 bp, synthetic construct
  misc_feature 1..80: note = Synthetic: >MH938449_8-cand-440-519
  source 1..80: mol_type = other DNA
tcaggtgaggaatgggagtacaaagactactttgatgaaaatgacacttttgaatatgatggtgtcgtttacttcaaagc

SEQ ID NO: 22886 - DNA, 80 bp, synthetic construct
  misc_feature 1..80: note = Synthetic: >MK472069_7-cand-490-569
  source 1..80: mol_type = other DNA
gtgtgagttcttatgttacacttcttatgtctttctctgcaacagcttacaattattactatgcggccgattatgtgtcc

SEQ ID NO: 22887 - DNA, 80 bp, synthetic construct
  misc_feature 1..80: note = Synthetic: >MG916903_12-cand-1720-1799
  source 1..80: mol_type = other DNA
gtgttaccagtctgctacaaacgtagtggtggtggtgttatacagttttctgacactgttgaagtcaaggagatagatcc

SEQ ID NO: 22888 - DNA, 80 bp, synthetic construct
  misc_feature 1..80: note = Synthetic: >JQ065046_5-cand-220-299
  source 1..80: mol_type = other DNA
tctgctaccagctctcattatgatggttgttagcgctaataccttctggattcctaacacctatctgcgtagtttttacc

SEQ ID NO: 22889 - DNA, 80 bp, synthetic construct
  misc_feature 1..80: note = Synthetic: >SBB_726_2-cand-0-79
  source 1..80: mol_type = other DNA
ggtgtcagacatgtttttacactgcttgacccctttggccggtttatatgcagtcatcgtactgtgaatgaatctctacc

SEQ ID NO: 22890 - DNA, 80 bp, synthetic construct
  misc_feature 1..80: note = Synthetic: >MH817484_4-cand-460-539
  source 1..80: mol_type = other DNA
gtaatggttgatgttaatggcactggcattacaagactattctattgtgactcacccctcaatagaattaagtgccaaca

SEQ ID NO: 22891 - DNA, 80 bp, synthetic construct
  misc_feature 1..80: note = Synthetic: >KU762338_8-cand-10-89
  source 1..80: mol_type = other DNA
gtacaagcacagacagtacttatagatggtagagaccaagatgcgtatagcaaattctgccagcttaacaatgctgtcta

SEQ ID NO: 22892 - DNA, 80 bp, synthetic construct
  misc_feature 1..80: note = Synthetic: >KU762338_7-cand-220-299
  source 1..80: mol_type = other DNA
taagcctactgaaacatggggcacgccttcatttacgggtgtggagtatgtaccacataacactacctatgtctcagtac

SEQ ID NO: 22893 - DNA, 80 bp, synthetic construct
  misc_feature 1..80: note = Synthetic: >FJ376619_12-cand-970-1049
  source 1..80: mol_type = other DNA
gtagtttcaaatgaagatgaataccttaagtgttttgaaacacctgaagtttcagcactttacaaggtcttccaaactga

SEQ ID NO: 22894 - DNA, 80 bp, synthetic construct
  misc_feature 1..80: note = Synthetic: >MN611518_2-cand-0-79
  source 1..80: mol_type = other DNA
tcttggggcatgtattttttccagaaaaattctgagggtcgtgccattgtacgaatttgtaagtggacttcatttaatac

SEQ ID NO: 22895 - DNA, 80 bp, synthetic construct
  misc_feature 1..80: note = Synthetic: >KJ473810_1-cand-80-159
  source 1..80: mol_type = other DNA
gtgccctttgttaccaatggtaaagtattaactgaaattatacccaaacctgtgttcaatcatggactggtgaaatgcca

SEQ ID NO: 22896 - DNA, 80 bp, synthetic construct
  misc_feature 1..80: note = Synthetic: >MK472068_9-cand-0-79
  source 1..80: mol_type = other DNA
gtggataacgcatcaaggcccaactcacgtgccaattcacgtaatcggagtcagagtggcaatccgcaatccagagcaaa

SEQ ID NO: 22897 - DNA, 80 bp, synthetic construct
  misc_feature 1..80: note = Synthetic: >KY073745_5-cand-0-79
  source 1..80: mol_type = other DNA
gtgtaaaggatgatgatttcgttctttgccttactggtgacaacgttctgcgtgctaccattggaccttttggtgaccga

SEQ ID NO: 22898 - DNA, 80 bp, synthetic construct
  misc_feature 1..80: note = Synthetic: >MH938449_3-cand-0-79
  source 1..80: mol_type = other DNA
gtgttactttcactcattatgcttttactgtgcctgtgatagcctttaatggtgttttgtttcctgttaaagagagtaaa

SEQ ID NO: 22899 - DNA, 80 bp, synthetic construct
  misc_feature 1..80: note = Synthetic: >MG596803_5-cand-630-709
  source 1..80: mol_type = other DNA
tgcacaaccttactgacagccagcgtgcttatataggttctactgcatatatacaacagtgtttaacacgctttttctta

SEQ ID NO: 22900 - DNA, 80 bp, synthetic construct
  misc_feature 1..80: note = Synthetic: >PDF_2560_6-cand-310-389
  source 1..80: mol_type = other DNA
taagatagatatcttgtgtaccgttgatggtgttaacttcaagtcagttgtgatagctgatggtgatgtttttggcaaga

SEQ ID NO: 22901 - DNA, 80 bp, synthetic construct
  misc_feature 1..80: note = Synthetic: >KY073746_4-cand-110-189
  source 1..80: mol_type = other DNA
tctaacagcaactacattctgcaggactttgatgttagctttggtggttttggtggtaacaaaatacctgtcgaccagta

SEQ ID NO: 22902 - DNA, 80 bp, synthetic construct
  misc_feature 1..80: note = Synthetic: >KX512809_13-cand-230-309
  source 1..80: mol_type = other DNA
tgggaaatcattctgagtggttctaaagatttgggattctttgataagtataaagcattggaatctctggatgacatcta

SEQ ID NO: 22903 - DNA, 80 bp, synthetic construct
  misc_feature 1..80: note = Synthetic: >MG916903_7-cand-0-79
  source 1..80: mol_type = other DNA
tagtggtaaggtgactgtcaccaggagtacagtctccgactgctgtaacagcaagcgtgttgttacaacacccgtatata

SEQ ID NO: 22904 - DNA, 80 bp, synthetic construct
  misc_feature 1..80: note = Synthetic: >HQ392469_3-cand-370-449
  source 1..80: mol_type = other DNA
ttaaatgacacattgaaacggtatgacatcattcttgctgaggctcctgagctagcatcacttgctgacatacactttga

SEQ ID NO: 22905 - DNA, 80 bp, synthetic construct
  misc_feature 1..80: note = Synthetic: >SBB_747_4-cand-90-169
  source 1..80: mol_type = other DNA
tggggcgctcgttacgttgtcctaactgttctgtctaaaggctttggtgttacacctgttgacattcctgatatttgtca

SEQ ID NO: 22906 - DNA, 80 bp, synthetic construct
  misc_feature 1..80: note = Synthetic: >MH938449_13-cand-800-879
  source 1..80: mol_type = other DNA
ttgatgaaaccactgcgtaatcaactaaatcattatgactgtttttaacaccaccttggtgctagtattggcctcgctca

SEQ ID NO: 22907 - DNA, 80 bp, synthetic construct
  misc_feature 1..80: note = Synthetic: >AY319651_1-cand-30-109
  source 1..80: mol_type = other DNA
tgcactccagctgaattaagtgttgtaaaggaagctccaggagaggttgacgagttcatccttattccaagtgtttctaa

SEQ ID NO: 22908 - DNA, 80 bp, synthetic construct
  misc_feature 1..80: note = Synthetic: >MG916902_10-cand-540-619
  source 1..80: mol_type = other DNA
tgccacaatacacagtaactacttatccatttctgcagacacattagaacgtgttgatttttaccttgctagtggtagaa

SEQ ID NO: 22909 - DNA, 80 bp, synthetic construct
  misc_feature 1..80: note = Synthetic: >KP886808_1-cand-0-79
  source 1..80: mol_type = other DNA
ttacatctcacacaggattattttttaccattccattctaacctaacacagtacttttctctcagtattcagtcagataa

SEQ ID NO: 22910 - DNA, 328 bp, synthetic construct
  source 1..328: mol_type = other DNA
tctttccgtctgacggtgtacgtcgcggagtaaacctacacagacctcagaaccttcgaactgatgggatgcaagaggatgtttacctggaactctcgaacaaacctccaagatcgtcccctcgcgtcgatgagcatatgggaactggcttctggccaggaggagatagcccctaccagcaggagaagctggctcgcgcgtcgaagccctccctgcgtgtacctcgccactccctccttcccctgtgggcggatcggtcggtctagtcggcttagttgggaccgctagttaccccactgtctacagcgtcggtctagcgggagtgtag

SEQ ID NO: 22911 - DNA, 299 bp, synthetic construct
  source 1..299: mol_type = other DNA
tctctgccccagagcgatacaacgggtccgacctcacgtcaccgataagtgtccgcgctagggtgatgactagtcgtgccctcaaaactggacgaggcaaaggctggacccggccaagtggggaggaatccgttggaccaccagggggcgagggccctccagtggtataactacggcttgaatcacgcctgtgggctagccgtatcgcgtgatgtcgggtcttgaggacctgagttcgctaggaggtcggagtcggagggctcatcgaccctgatgtccgtgcgcggtggcgcgggccg

SEQ ID NO: 22912 - DNA, 300 bp, synthetic construct
  source 1..300: mol_type = other DNA
ttctctgccccagagcgatacaacgagtccgacctcacgtcaccgataagtgtccgcgctagggtgatgactagtcgtgccctcaaaactggacgaggcaaaggctggacccggccaagtggggaggaatccgttggaccaccagggggcgagggccctccagtggtataactacggcttgaatcacgcctgtgggctagccgtatcgcgtgatgtcgggtcttgaggacccgagttcgctaggagggtggagtcggagggctcatcgaccctgatgtccgtgcgcggtggcgcgggccg

SEQ ID NO: 22913 - DNA, 321 bp, synthetic construct
  source 1..321: mol_type = other DNA
ttacctataaacagagacattactcgagtccgctttccttgacaccgatattcttttaatcccctgtggtcatcgtaatgtctgaagatgactagtcgtgccctcaaaactggacgaggcaaaggctggacccggccaagtggggaggaatccgttggaccaccagggggcgagggccctccagtggtataactacggcttgaatcacgcctgtgggctagccgtatcgcgtgatgtcgggtcttgaggacctgagttcgctaggaggtcggagtcggagggctcatcgaccctggtgtccgtgcgcggtggcgcgggccg

SEQ ID NO: 22914 - DNA, 333 bp, synthetic construct
  source 1..333: mol_type = other DNA
ccgcctcctctcatcagacttaacccaatactccaggggacgccccatggagtggagtcggtaacttgagtgaagcgaccggcactcagacaaggttcgaggccgtttcctccgtaggcggcccggggaggggcttcccgccccaggtgccgtagaggacgggtcagactggagcgcgcctcggggcaagagacccttgagtggaggggcttcgagtccctctcgggacaatcccggcggagaccgggatcagagtctggaagggttccctgtaccctcacctcactgtcctgcgtgagtcgagcaccggggtgactactcgaagggaggcgg

SEQ ID NO: 22915 - DNA, 699 bp, synthetic construct
  source 1..699: mol_type = other DNA
gtacgactgtggggcaaagacggtttttttttttttttttttttttttttcggacctcaccgcacacgcggaaattcggggccgatgagccctcccgaatccgccctctgagcgaactcgggccctccgtctacaacgatcctcggctctagcgcggtgacgttaggtcggccccggccgtctgtcttgttctctgggcctctggggcagacccccaccctcaccgcccgccctttgccgctgttttctccctcgctcttaccctcttttgcgtttttctctgttatcctccacggtgtgtcgtagggggcggagcgcggttctgattttaatttttcggtggggctcttttgggttctcggcagtggcgactttgtcctccgcttttggaaagagcgctgtacggttcgtcctcgcttgtcgggtctttgcggggcctcaaatgctcgatcagagacagtaactcggtagttcttcctttttggtgagtctggcgcaagagagggagagtgaggggttatgcctctcttcttgctagtagttaccgactgccgtcaacgtcggttcgttgcggtctttcggccgaagtgcgagtcctcttttgcgatggagagaaggagcaccaaaagccacgagatgtgcaagtctctttgaagagatcattgtgtgatatctttactagggactttcatatcagaa

SEQ ID NO: 22916 - DNA, 328 bp, synthetic construct
  source 1..328: mol_type = other DNA
ctacactcccgctagaccgacgctgtagacagtggggtaactagcggtcccaactaagccgactagaccgaccgatccgcccacaggggaaggagggagtggcgaggtacacgcagggagggcttcgacgcgcgagccagcttctcctgctggtaggggctatctcctcctggccagaagccagttcccatatgctcatcgacgcgaggggacgatcttggaggtttgttcgagagttccaggtaaacatcctcttgcatcccatcagttcgaaggttctgaggtctgtgtaggtttactccgcgacgtacaccgtcagacggaaaga

SEQ ID NO: 22917 - DNA, 50 bp, synthetic construct
  source 1..50: mol_type = other DNA
ctgaggtctgtgtaggtttactccgcgacgtacaccgtcagacggaaaga

SEQ ID NO: 22918 - DNA, 50 bp, synthetic construct
  source 1..50: mol_type = other DNA
gatcttggaggtttgttcgagagttccaggtaaacatcctcttgcatccc

SEQ ID NO: 22919 - DNA, 50 bp, synthetic construct
  source 1..50: mol_type = other DNA
gctggtaggggctatctcctcctggccagaagccagttcccatatgctca

SEQ ID NO: 22920 - DNA, 50 bp, synthetic construct
  source 1..50: mol_type = other DNA
caggggaaggagggagtggcgaggtacacgcagggagggcttcgacgcgc

SEQ ID NO: 22921 - DNA, 50 bp, synthetic construct
  source 1..50: mol_type = other DNA
gacgctgtagacagtggggtaactagcggtcccaactaagccgactagac

SEQ ID NO: 22922 - DNA, 50 bp, synthetic construct
  source 1..50: mol_type = other DNA
acttatcggtgacgtgaggtcggacccgttgtatcgctctggggcagaga

SEQ ID NO: 22923 - DNA, 50 bp, synthetic construct
  source 1..50: mol_type = other DNA
ggccgggtccagcctttgcctcgtccagttttgagggcacgactagtcat

SEQ ID NO: 22924 - DNA, 50 bp, synthetic construct
  source 1..50: mol_type = other DNA
caagccgtagttataccactggagggccctcgccccctggtggtccaacg

SEQ ID NO: 22925 - DNA, 50 bp, synthetic construct
  source 1..50: mol_type = other DNA
ctcctagcgaactcaggtcctcaagacccgacatcacgcgatacggctag

SEQ ID NO: 22926 - DNA, 50 bp, synthetic construct
  source 1..50: mol_type = other DNA
cttatcggtgacgtgaggtcggactcgttgtatcgctctggggcagagaa

SEQ ID NO: 22927 - DNA, 50 bp, synthetic construct
  source 1..50: mol_type = other DNA
gccgggtccagcctttgcctcgtccagttttgagggcacgactagtcatc

SEQ ID NO: 22928 - DNA, 50 bp, synthetic construct
  source 1..50: mol_type = other DNA
aagccgtagttataccactggagggccctcgccccctggtggtccaacgg

SEQ ID NO: 22929 - DNA, 50 bp, synthetic construct
  source 1..50: mol_type = other DNA
tcctagcgaactcgggtcctcaagacccgacatcacgcgatacggctagc

SEQ ID NO: 22930 - DNA, 50 bp, synthetic construct
  source 1..50: mol_type = other DNA
tatcggtgtcaaggaaagcggactcgagtaatgtctctgtttataggtaa

SEQ ID NO: 22931 - DNA, 50 bp, synthetic construct
  source 1..50: mol_type = other DNA
gtccagttttgagggcacgactagtcatcttcagacattacgatgaccac

SEQ ID NO: 22932 - DNA, 50 bp, synthetic construct
  source 1..50: mol_type = other DNA
agggccctcgccccctggtggtccaacggattcctccccacttggccggg

SEQ ID NO: 22933 - DNA, 50 bp, synthetic construct
  source 1..50: mol_type = other DNA
aagacccgacatcacgcgatacggctagcccacaggcgtgattcaagccg

SEQ ID NO: 22934 - DNA, 50 bp, synthetic construct
  source 1..50: mol_type = other DNA
accgcgcacggacaccagggtcgatgagccctccgactccgacctcctag

SEQ ID NO: 22935 - DNA, 50 bp, synthetic construct
  source 1..50: mol_type = other DNA
ccatggggcgtcccctggagtattgggttaagtctgatgagaggaggcgg

SEQ ID NO: 22936 - DNA, 50 bp, synthetic construct
  source 1..50: mol_type = other DNA
acggaggaaacggcctcgaaccttgtctgagtgccggtcgcttcactcaa

SEQ ID NO: 22937 - DNA, 50 bp, synthetic construct
  source 1..50: mol_type = other DNA
ggcgcgctccagtctgacccgtcctctacggcacctggggcgggaagccc

SEQ ID NO: 22938 - DNA, 50 bp, synthetic construct
  source 1..50: mol_type = other DNA
ggtctccgccgggattgtcccgagagggactcgaagcccctccactcaag

SEQ ID NO: 22939 - DNA, 50 bp, synthetic construct
  source 1..50: mol_type = other DNA
ccggtgctcgactcacgcaggacagtgaggtgagggtacagggaaccctt

SEQ ID NO: 22940 - DNA, 50 bp, synthetic construct
  source 1..50: mol_type = other DNA
aacagcggcaaagggcgggcggtgagggtgggggtctgccccagaggccc

SEQ ID NO: 22941 - DNA, 50 bp, synthetic construct
  source 1..50: mol_type = other DNA
ccccctacgacacaccgtggaggataacagagaaaaacgcaaaagagggt

SEQ ID NO: 22942 - DNA, 50 bp, synthetic construct
  source 1..50: mol_type = other DNA
aaagtcgccactgccgagaacccaaaagagccccaccgaaaaattaaaat

SEQ ID NO: 22943 - DNA, 50 bp, synthetic construct
  source 1..50: mol_type = other DNA
gaggccccgcaaagacccgacaagcgaggacgaaccgtacagcgctcttt

SEQ ID NO: 22944 - DNA, 50 bp, synthetic construct
  source 1..50: mol_type = other DNA
cctctcttgcgccagactcaccaaaaaggaagaactaccgagttactgtc

SEQ ID NO: 22945 - DNA, 50 bp, synthetic construct
  source 1..50: mol_type = other DNA
aacgaaccgacgttgacggcagtcggtaactactagcaagaagagaggca

SEQ ID NO: 22946 - DNA, 50 bp, synthetic construct
  source 1..50: mol_type = other DNA
tcgtggcttttggtgctccttctctccatcgcaaaagaggactcgcactt

SEQ ID NO: 22947 - DNA, 50 bp, synthetic construct
  source 1..50: mol_type = other DNA
ttctgatatgaaagtccctagtaaagatatcacacaatgatctcttcaaa

SEQ ID NO: 22948 - DNA, 50 bp, synthetic construct
  source 1..50: mol_type = other DNA
cggcccgcgccaccgcgcacggacatcagggtcgatgagccctccgactc

SEQ ID NO: 22949 - DNA, 50 bp, synthetic construct
  source 1..50: mol_type = other DNA
ctctgttcagcattgtaccattcacatgacctttcacgtgaacctgcttg

SEQ ID NO: 22950 - DNA, 50 bp, synthetic construct
  source 1..50: mol_type = other DNA
ggcagtgggaggagttcatatgaagtttcctgtaaattgattttggggat

SEQ ID NO: 22951 - DNA, 50 bp, synthetic construct
  source 1..50: mol_type = other DNA
ctaaatcgtcatttgactctcatctcacgaatcaacttgtcccgggactt

SEQ ID NO: 22952 - DNA, 50 bp, synthetic construct
  source 1..50: mol_type = other DNA
ttacccgatgtaaaagatggggtcttttgatgctatcgggaatactttga

SEQ ID NO: 22953 - DNA, 50 bp, synthetic construct
  source 1..50: mol_type = other DNA
tgtttcattcgcgttcatgggtgcatttctgcaatccagttccacatcgg

SEQ ID NO: 22954 - DNA, 50 bp, synthetic construct
  source 1..50: mol_type = other DNA
ctagttggagtggtggagaacgagtcggatatatggcggtagaagtcgtt

SEQ ID NO: 22955 - DNA, 50 bp, synthetic construct
  source 1..50: mol_type = other DNA
tgagtttcctggaccgccacgaagtatagggagatctcctcggacaagac

SEQ ID NO: 22956 - DNA, 50 bp, synthetic construct
  source 1..50: mol_type = other DNA
cgggatttggagttgtcaatttagttgttttgacgagcggtcttgtgatg

SEQ ID NO: 22957 - DNA, 50 bp, synthetic construct
  source 1..50: mol_type = other DNA
gaaattgtatagacttgtgtgttatcgattctgggtttgaccctaatcta

SEQ ID NO: 22958 - DNA, 50 bp, synthetic construct
  source 1..50: mol_type = other DNA
tatttcgattttgagtggactcaacattttttgaggtcaactgtgtttta

SEQ ID NO: 22959 - DNA, 50 bp, synthetic construct
  source 1..50: mol_type = other DNA
cagtgtgctaattgggttcagttatcttcggccgcatttctcacaaaatc

SEQ ID NO: 22960 - DNA, 50 bp, synthetic construct
  source 1..50: mol_type = other DNA
tatttgctttcaaattgattcgatatgattggggtcccaaccagttaaag

SEQ ID NO: 22961 - DNA, 50 bp, synthetic construct
  source 1..50: mol_type = other DNA
tacgtcgagttttgcgaatcggatcggtgtgggggtgccctttgtcgtca

SEQ ID NO: 22962 - DNA, 50 bp, synthetic construct
  source 1..50: mol_type = other DNA
ggcaaggtcactcaagtgggagatttagtggtgctagttttccctgttcg

SEQ ID NO: 22963 - DNA, 50 bp, synthetic construct
  source 1..50: mol_type = other DNA
atttgtttatccaaaccaggatcggaaagataatcgagaatcattctaat

SEQ ID NO: 22964 - DNA, 50 bp, synthetic construct
  source 1..50: mol_type = other DNA
tatagtagagttgaatcataatatgggtgtgggtgggttcttgtcccaaa

SEQ ID NO: 22965 - DNA, 50 bp, synthetic construct
  source 1..50: mol_type = other DNA
aggagggacatgctttcctgttctctttattccggatgaagtgtttcgcg

SEQ ID NO: 22966 - DNA, 50 bp, synthetic construct
  source 1..50: mol_type = other DNA
aatttcaggatgcactagactcaagtctggcctcattaggtccagccaaa

SEQ ID NO: 22967 - DNA, 50 bp, synthetic construct
  source 1..50: mol_type = other DNA
tggagctacaacctagtcctgtagggctaccacgtcggcgataatttcca

SEQ ID NO: 22968 - DNA, 50 bp, synthetic construct
  source 1..50: mol_type = other DNA
tgttcaatgggatccctattgtcgcgttaggataagatctcaggtatagt

SEQ ID NO: 22969 - DNA, 50 bp, synthetic construct
  source 1..50: mol_type = other DNA
acgattctgaagtggtcagtttcgcttgatgatatgagttaactaggtta

SEQ ID NO: 22970 - DNA, 50 bp, synthetic construct
  source 1..50: mol_type = other DNA
gtttggacgtaatttttaaagccaaccccgctggagcctcgtcttgggtt

SEQ ID NO: 22971 - DNA, 50 bp, synthetic construct
  source 1..50: mol_type = other DNA
ctgggatacctcgaaattaaataattacgtttgtcatggattgtttgggt

SEQ ID NO: 22972 - DNA, 50 bp, synthetic construct
  source 1..50: mol_type = other DNA
gaatgaaaattggtcactttaactggacgggcacttctccgcccgtactg

SEQ ID NO: 22973 - DNA, 50 bp, synthetic construct
  source 1..50: mol_type = other DNA
atcgtattagtgaacaaggaatttatccctggacatacttaccgaggtgc

SEQ ID NO: 22974 - DNA, 50 bp, synthetic construct
  source 1..50: mol_type = other DNA
ataatctccgtggcggacgggtcactgtgtacaaattgccggcgccatgg

SEQ ID NO: 22975 - DNA, 50 bp, synthetic construct
  source 1..50: mol_type = other DNA
cattttccttgagccgtttggaatggggcggacaaatggtttttgtagtg

SEQ ID NO: 22976 - DNA, 50 bp, synthetic construct
  source 1..50: mol_type = other DNA
tgttcagtaataatgggagtgacagttgggttgtgtccgtacgagtattc

SEQ ID NO: 22977 - DNA, 50 bp, synthetic construct
  source 1..50: mol_type = other DNA
gtattcggacgcagtctagttttgtgacttgactgttaattgtcgggtta

SEQ ID NO: 22978 - DNA, 50 bp, synthetic construct
  source 1..50: mol_type = other DNA
ctggttagatagtgggatatcttcttgattacaatcatattcattgtact

SEQ ID NO: 22979 - DNA, 50 bp, synthetic construct
  source 1..50: mol_type = other DNA
aagttcgagttgtgggtgatggattttttagggtttgtatattgacttga

SEQ ID NO: 22980 - DNA, 50 bp, synthetic construct
  source 1..50: mol_type = other DNA
acatctctctcattttttaaattgtgggtatcatccggattttcgtcggt

SEQ ID NO: 22981 - DNA, 50 bp, synthetic construct
  source 1..50: mol_type = other DNA
taggggaacatttaaattgacaatcaggtttctccttgtcgagaaacctg

SEQ ID NO: 22982 - DNA, 50 bp, synthetic construct
  source 1..50: mol_type = other DNA
cactatcgaccaacaggttctatcttagaatcaagttgaaatttaaacgg

SEQ ID NO: 22983 - DNA, 50 bp, synthetic construct
  source 1..50: mol_type = other DNA
gtgggcagatacatcgttttatcacccttctaaatatccatctccgctgt

SEQ ID NO: 22984 - DNA, 50 bp, synthetic construct
  source 1..50: mol_type = other DNA
cgttcctctcggtttcgattctgggggctttggtctgctcgatggattct

SEQ ID NO: 22985 - DNA, 50 bp, synthetic construct
  source 1..50: mol_type = other DNA
ttcgtattatatcgttcctgattggggatatggaagacgtattacttaat

SEQ ID NO: 22986 - DNA, 50 bp, synthetic construct
  source 1..50: mol_type = other DNA
gctatctttaactttggaccgcgttatctatatcatggcgttccctttct

SEQ ID NO: 22987 - DNA, 50 bp, synthetic construct
  source 1..50: mol_type = other DNA
ggtttgggtgaggtggaatgatggtctgttggaatcggtttggtaaatgg

SEQ ID NO: 22988 - DNA, 50 bp, synthetic construct
  source 1..50: mol_type = other DNA
cattttcagcattgttccaaaggcatccacttggacgccttcctagtaat

SEQ ID NO: 22989 - DNA, 50 bp, synthetic construct
  source 1..50: mol_type = other DNA
ggccccagccgggtgccgggaccgcctcgcgactcttctgccagcttgaa

SEQ ID NO: 22990 - DNA, 50 bp, synthetic construct
  source 1..50: mol_type = other DNA
aaacatgtgtggcgggcagcgatgatggctaacctaccaaatcactccgg

SEQ ID NO: 22991 - DNA, 50 bp, synthetic construct
  source 1..50: mol_type = other DNA
gggtacttgctcccttaagggctcattcacgcccagtattcgaacgcaac

SEQ ID NO: 22992 - DNA, 50 bp, synthetic construct
  source 1..50: mol_type = other DNA
gcggccgtccgcgcccattgggcaacttggggtaagcactacccctagcc

SEQ ID NO: 22993 - DNA, 50 bp, synthetic construct
  source 1..50: mol_type = other DNA
ctacgggaatctacaggccccgacgtgcgcgcgatgtgactgaccgagtc

SEQ ID NO: 22994 - DNA, 50 bp, synthetic construct
  source 1..50: mol_type = other DNA
agggggttgaagaatctccctgttcaccgcaagtcggtgggctctaactc

SEQ ID NO: 22995 - DNA, 50 bp, synthetic construct
  source 1..50: mol_type = other DNA
aattaaggctattgcttgctctgagaccgtacgattgatcaatgcgctgg

SEQ ID NO: 22996 - DNA, 50 bp, synthetic construct
  source 1..50: mol_type = other DNA
cgagaaagagctaaggcacccaccaccacgtaccggcaagaatcaaccac

SEQ ID NO: 22997 - DNA, 50 bp, synthetic construct
  source 1..50: mol_type = other DNA
gaattaaactgagttgtgccctttggagtgggccgggcctgtgcctgtcc

SEQ ID NO: 22998 - DNA, 50 bp, synthetic construct
  source 1..50: mol_type = other DNA
ataccaacgtttcgactttgaatttccttaactgccttcccgtggtggtc

SEQ ID NO: 22999 - DNA, 50 bp, synthetic construct
  source 1..50: mol_type = other DNA
ccgcaataagggtactgggcggcccgtcgaaggccctttggtttcagaaa

SEQ ID NO: 23000 - DNA, 50 bp, synthetic construct
  source 1..50: mol_type = other DNA
tccaagcttctgctagtctatggcagcatcaaggctggtatttgctacgg

SEQ ID NO: 23001 - DNA, 50 bp, synthetic construct
  source 1..50: mol_type = other DNA
gcgttctgcctggtctcgctttcgtaaacggttcttacaaaagtaattag

SEQ ID NO: 23002 - DNA, 50 bp, synthetic construct
  source 1..50: mol_type = other DNA
gtactaattctccctgccggcccccgtaagcataacgcggcgatctccac

SEQ ID NO: 23003 - DNA, 50 bp, synthetic construct
  source 1..50: mol_type = other DNA
tatggcgtcgatccttattaccttatcctggcgccaagataaaacaacca

SEQ ID NO: 23004 - DNA, 50 bp, synthetic construct
  source 1..50: mol_type = other DNA
ggcgccccgggcttcgcaaatgaaacttttttaatctcacaagtttcgtc

SEQ ID NO: 23005 - DNA, 50 bp, synthetic construct
  source 1..50: mol_type = other DNA
cgctcggtggcgggcaggggcggggaacggagagccgcgggggagctacg

SEQ ID NO: 23006 - DNA, 50 bp, synthetic construct
  source 1..50: mol_type = other DNA
atttcaacgacgtcaatttttcgagcatcaacctagaaccctcgcccgcc

SEQ ID NO: 23007 - DNA, 50 bp, synthetic construct
  source 1..50: mol_type = other DNA
tcctaggtaacctcccgttcagaccacggtcgtcggcgccattaaggtcg

SEQ ID NO: 23008 - DNA, 50 bp, synthetic construct
  source 1..50: mol_type = other DNA
ttattgttatgtcctgagaaagctccgggacattaaccttactcaggtga

SEQ ID NO: 23009 - DNA, 50 bp, synthetic construct
  source 1..50: mol_type = other DNA
gtgtaggttccttccgtcgtccgcgcgtttaatgggtgagggctgggccc

SEQ ID NO: 23010 - DNA, 50 bp, synthetic construct
  source 1..50: mol_type = other DNA
taccactggtgcccactgccccttagtcccaagctaaggcctctccctcg

SEQ ID NO: 23011 - DNA, 50 bp, synthetic construct
  source 1..50: mol_type = other DNA
caccgccgctgctgggtaagcttgcagacgggatagttgaaagctaccat

SEQ ID NO: 23012 - DNA, 50 bp, synthetic construct
  source 1..50: mol_type = other DNA
cggccccccgcccgcggccgccgaaaccactgagatctattggagcccgg

SEQ ID NO: 23013 - DNA, 50 bp, synthetic construct
  source 1..50: mol_type = other DNA
aagcgccccccctacgcacgtaaatagtctagttttggttgggccagtcg

SEQ ID NO: 23014 - DNA, 50 bp, synthetic construct
  source 1..50: mol_type = other DNA
aggagaggatgaacctattgacaccattaagatctcgattatgtacggct

SEQ ID NO: 23015 - DNA, 50 bp, synthetic construct
  source 1..50: mol_type = other DNA
gtgccggccatgtcactttgacgcttaccgagtaatttagtcaataccaa

SEQ ID NO: 23016 - DNA, 50 bp, synthetic construct
  source 1..50: mol_type = other DNA
tggaccaactaggacggtcatcgtatacgaacagagtttctaattcggta

SEQ ID NO: 23017 - DNA, 50 bp, synthetic construct
  source 1..50: mol_type = other DNA
gagggagcgacgctagataactttcagtcgggagctgtgttcccaaacag

SEQ ID NO: 23018 - DNA, 50 bp, synthetic construct
  source 1..50: mol_type = other DNA
tggaccgcgatttggtaagcatctgctggacgaagacccagccccaaagc

SEQ ID NO: 23019 - DNA, 50 bp, synthetic construct
  source 1..50: mol_type = other DNA
ctttgccccgcgccggcctttccgccggcgggggagcgggcagtgcgtgg

SEQ ID NO: 23020 - DNA, 50 bp, synthetic construct
  source 1..50: mol_type = other DNA
gccctcccgcgcacggggcggcgcgcggccctggccccaggccacgcctc

SEQ ID NO: 23021 - DNA, 50 bp, synthetic construct
  source 1..50: mol_type = other DNA
gagcctatcggccagggggcggacaggggcggccgcccggcgggggggga

SEQ ID NO: 23022 - DNA, 50 bp, synthetic construct
  source 1..50: mol_type = other DNA
ttgcggagattcagtcttagggcgggtccgcttgctatgccgtcgcggcg

SEQ ID NO: 23023 - DNA, 50 bp, synthetic construct
  source 1..50: mol_type = other DNA
taaaccacatacacgaaccgactcctcggttaccccgcttcgatggtaga

SEQ ID NO: 23024 - DNA, 50 bp, synthetic construct
  source 1..50: mol_type = other DNA
ggatgactactacacaacaacggtaccattaggacgagtcatgctctcct

SEQ ID NO: 23025 - DNA, 50 bp, synthetic construct
  source 1..50: mol_type = other DNA
taacaagtgggtgattatcccttgcactcgacccaaatctggcagcactc

SEQ ID NO: 23026 - DNA, 50 bp, synthetic construct
  source 1..50: mol_type = other DNA
agcgaaaaactaggaagctacagccgagaaggatagtaacacttcgtctt

SEQ ID NO: 23027 - DNA, 50 bp, synthetic construct
  source 1..50: mol_type = other DNA
tcctccacagtcttttcaatggtgtccctattgaccgaacaccgccggtt

SEQ ID NO: 23028 - DNA, 50 bp, synthetic construct
  source 1..50: mol_type = other DNA
aagtcatgcttatgtctggcactttcgccccggagtgctaggaagactgg

SEQ ID NO: 23029 - DNA, 50 bp, synthetic construct
  source 1..50: mol_type = other DNA
cgctcgagtccctcctgtctttggagggcacctcgtcttcccgttttcga

SEQ ID NO: 23030 - DNA, 50 bp, synthetic construct
  source 1..50: mol_type = other DNA
gtcacggtccacccctcaaactgaccccgccatgtggacagtttgccatt

SEQ ID NO: 23031 - DNA, 50 bp, synthetic construct
  source 1..50: mol_type = other DNA
tcgggctccccgagagcgaagaccgcggttcgcgggcgggccggcccgcg

SEQ ID NO: 23032 - DNA, 50 bp, synthetic construct
  source 1..50: mol_type = other DNA
gcccggcggccactttatggtgatgagactagcaaaaaagtgactgggcc

SEQ ID NO: 23033 - DNA, 50 bp, synthetic construct
  source 1..50: mol_type = other DNA
caccctccgggggccgcgggggggccacaggggcgctccccgggccccgc

SEQ ID NO: 23034 - DNA, 50 bp, synthetic construct
  source 1..50: mol_type = other DNA
ttcttctgggacaactcgaactgagatcagaccgtgccacttctctgtac

SEQ ID NO: 23035 - DNA, 50 bp, synthetic construct
  source 1..50: mol_type = other DNA
gacagggatggatgataggtcgctttggtgtcggttcccttgcccgaacc

SEQ ID NO: 23036 - DNA, 50 bp, synthetic construct
  source 1..50: mol_type = other DNA
aattccatcggtttacggagcagtagattaatcactgcgcgtacttacct

SEQ ID NO: 23037 - DNA, 50 bp, synthetic construct
  source 1..50: mol_type = other DNA
agacttacagtttcacttctttaagttacttcgcgcccatttgccgccct

SEQ ID NO: 23038 - DNA, 50 bp, synthetic construct
  source 1..50: mol_type = other DNA
ttaattttgtttcgtagcgcttccgggcgccgcccacaactgcgctacac

SEQ ID NO: 23039 - DNA, 50 bp, synthetic construct
  source 1..50: mol_type = other DNA
gagcggagccggccgcggatcgtcggctgaatcttgaccacgcctggtcc

SEQ ID NO: 23040 - DNA, 50 bp, synthetic construct
  source 1..50: mol_type = other DNA
cgcctccccggcgcccggccagggggggcggcccaggcgggggccccggc

SEQ ID NO: 23041 - DNA, 50 bp, synthetic construct
  source 1..50: mol_type = other DNA
ggggccggggcaggcggggggcaaggggggaggaggagccgcgcgccgcc

SEQ ID NO: 23042 - DNA, 50 bp, synthetic construct
  source 1..50: mol_type = other DNA
cctcgccagcccgccgccgccagccgcccgccgccccgccccgccaagca

SEQ ID NO: 23043 - DNA, 50 bp, synthetic construct
  source 1..50: mol_type = other DNA
gccgccgcgccgcgcggggggtgggggtggggtgcagagccagcgcgcgc

SEQ ID NO: 23044 - DNA, 50 bp, synthetic construct
  source 1..50: mol_type = other DNA
cggcccgggaagggcacctagcggggtcgacgccgcccgcagcgccggcg

SEQ ID NO: 23045 - DNA, 50 bp, synthetic construct
  source 1..50: mol_type = other DNA
gtccaggggcgctccccccggggcccctgggccccccggccgccgccgcg

SEQ ID NO: 23046 - DNA, 50 bp, synthetic construct
  source 1..50: mol_type = other DNA
gccgcccccctcttcccagccccgccgtccccggcgcgccgccggcggcc

SEQ ID NO: 23047 - DNA, 50 bp, synthetic construct
  source 1..50: mol_type = other DNA
agagagagagagagagggggcgaggggcaggaggggggaggggccccctc

SEQ ID NO: 23048 - DNA, 50 bp, synthetic construct
  source 1..50: mol_type = other DNA
ggggggagcgccgggagggggcggggtgggcgcgcgcggcgagcgaggga

SEQ ID NO: 23049 - DNA, 50 bp, synthetic construct
  source 1..50: mol_type = other DNA
gcgcttcgccccgacccgcgcgcggcgccgacctgctccgcgcgcggggg

SEQ ID NO: 23050 - DNA, 50 bp, synthetic construct
  source 1..50: mol_type = other DNA
ccgttcggcctaggcattgaagccctattcctaaccgagattcccgaccc

SEQ ID NO: 23051 - DNA, 50 bp, synthetic construct
  source 1..50: mol_type = other DNA
taggcgtcgtccagaggttccacttgtcggagaccgtacaaccttgttac

SEQ ID NO: 23052 - DNA, 50 bp, synthetic construct
  source 1..50: mol_type = other DNA
ctcgagagcgaccgggaacttttaggccccctctcccacatttagagcgc

SEQ ID NO: 23053 - DNA, 50 bp, synthetic construct
  source 1..50: mol_type = other DNA
ttacccaagcggggctctctccccgggcacggaacctttcgcagcgccaa

SEQ ID NO: 23054 - DNA, 50 bp, synthetic construct
  source 1..50: mol_type = other DNA
ggcctcttcggccgccctcggggcccctctcaagagaaaagaaacacttc

SEQ ID NO: 23055 - DNA, 50 bp, synthetic construct
  source 1..50: mol_type = other DNA
taggggcttaggcctcaccgcctctacccgcggcgctccgcaggtcacgc

SEQ ID NO: 23056 - DNA, 50 bp, synthetic construct
  source 1..50: mol_type = other DNA
ggcaaggcttccctgcccgctaccggaggcaacgggagccggctagcttt

SEQ ID NO: 23057 - DNA, 50 bp, synthetic construct
  source 1..50: mol_type = other DNA
cctcttcccaaggtacacttgtcgtcaacttgtacccagtcagccaggac

SEQ ID NO: 23058 - DNA, 50 bp, synthetic construct
  source 1..50: mol_type = other DNA
ggcggcgtccacgtctagaaccaccatcatcgtttataagtttgctcttg

SEQ ID NO: 23059 - DNA, 50 bp, synthetic construct
  source 1..50: mol_type = other DNA
gcggcgctgctcatcctcccggcgacgccactcggaacttcggatcccgc

SEQ ID NO: 23060 - DNA, 50 bp, synthetic construct
  source 1..50: mol_type = other DNA
gggtgcggaggaggggaggagggcgggtgcggggcgaggggcgggggcct

SEQ ID NO: 23061 - DNA, 50 bp, synthetic construct
  source 1..50: mol_type = other DNA
cacacgcagcctcccgccgccgccgccgccgccgcccccacaccccagga

SEQ ID NO: 23062 - DNA, 50 bp, synthetic construct
  source 1..50: mol_type = other DNA
gccggcagcggccgtcagctctcacctgccctcgccgcccccgccgcgcg

SEQ ID NO: 23063 - DNA, 50 bp, synthetic construct
  source 1..50: mol_type = other DNA
ttgttgagtggacggcttagttgatcgggacttttacctaccgcgacctc

SEQ ID NO: 23064 - DNA, 50 bp, synthetic construct
  source 1..50: mol_type = other DNA
tccacaaccaactatatctgtcgtcctgccaccggtaccttcagccttag

SEQ ID NO: 23065 - DNA, 50 bp, synthetic construct
  source 1..50: mol_type = other DNA
gcgacgccctacttggcttgcggcccaattccgcgggctacggctgcgag

SEQ ID NO: 23066 - DNA, 50 bp, synthetic construct
  source 1..50: mol_type = other DNA
gcgaccgcacctcggcccgcaccttacgctcacggatcacccggtgaaaa

SEQ ID NO: 23067 - DNA, 50 bp, synthetic construct
  source 1..50: mol_type = other DNA
tctccagaaccccggctttgctagagttggataagagtttgaaatttacc

SEQ ID NO: 23068 - DNA, 50 bp, synthetic construct
  source 1..50: mol_type = other DNA
tcgaccgcgagagcgtctgggctgcgtgggggcggtgcgtcaaaataggc

SEQ ID NO: 23069 - DNA, 50 bp, synthetic construct
  source 1..50: mol_type = other DNA
catatccccgctttctgattagcttggtagatcatcgaccaagggaggct

SEQ ID NO: 23070 - DNA, 50 bp, synthetic construct
  source 1..50: mol_type = other DNA
tcggtctcctttgagaccacctccaggcatcgccaggactgcacgtttag

SEQ ID NO: 23071 - DNA, 50 bp, synthetic construct
  source 1..50: mol_type = other DNA
cctccacctcgtgctcgcgtgcacaatcctgggctttctaccacttgata

SEQ ID NO: 23072 - DNA, 50 bp, synthetic construct
  source 1..50: mol_type = other DNA
ccctagggctccggagaggtcaggcggctcccgcgtggtggccgggcaga

SEQ ID NO: 23073 - DNA, 50 bp, synthetic construct
  source 1..50: mol_type = other DNA
ccccgagcgtgctttcggcggcaccgcgttacttccacttccggccgcgc

SEQ ID NO: 23074 - DNA, 50 bp, synthetic construct
  source 1..50: mol_type = other DNA
tgcagccgatgggtgggctgggcagaactttgtgcctggttcctcagatt

SEQ ID NO: 23075 - DNA, 50 bp, synthetic construct
  source 1..50: mol_type = other DNA
gagccccggtgcgcgcgcagggggcttctccccctgccgcctcgctcgcg

SEQ ID NO: 23076 - DNA, 50 bp, synthetic construct
  source 1..50: mol_type = other DNA
cccgccccgcctgacaggggtcacgcggggcccgcccagcgcggcagccc

SEQ ID NO: 23077 - DNA, 50 bp, synthetic construct
  source 1..50: mol_type = other DNA
gagagggtggggaggaggggcgcgggggcggggccgctgccccccccacg

SEQ ID NO: 23078 - DNA, 50 bp, synthetic construct
  source 1..50: mol_type = other DNA
ggggcgcccccgcgcggccgcagaggagcacccccccggcccggtgggga

SEQ ID NO: 23079 - DNA, 50 bp, synthetic construct
  source 1..50: mol_type = other DNA
gcagcggcgcgagaggggggagggccgcgggtgggggcgccccttagggg

SEQ ID NO: 23080 - DNA, 50 bp, synthetic construct
  source 1..50: mol_type = other DNA
ggggctcacaatgtcgggggggccgtcgtcgtgagcggcttagggccccg

SEQ ID NO: 23081 - DNA, 50 bp, synthetic construct
  source 1..50: mol_type = other DNA
cgcccagccccgccgccgccgccgccgccaccgccgccgccgcccccgcc

SEQ ID NO: 23082 - DNA, 50 bp, synthetic construct
  source 1..50: mol_type = other DNA
caggcaggcaggaggaggagggggcagaggcggggggccggggcgcagga

SEQ ID NO: 23083 - DNA, 50 bp, synthetic construct
  source 1..50: mol_type = other DNA
cggcgctggccgaggccctgccgacccttccgggccgccccttccaccga

SEQ ID NO: 23084 - DNA, 50 bp, synthetic construct
  source 1..50: mol_type = other DNA
gccgccccctggcagggggctggccgctggccggcggcggcccgcgtaaa

SEQ ID NO: 23085 - DNA, 50 bp, synthetic construct
  source 1..50: mol_type = other DNA
gaggaggggcctcccccgcccgaggccgcccacgcccccacccgcccgcc

SEQ ID NO: 23086 - DNA, 50 bp, synthetic construct
  source 1..50: mol_type = other DNA
agaaagggcggggggcaaggagggctggggaggtgggcgggagggaaggg

SEQ ID NO: 23087 - DNA, 50 bp, synthetic construct
  source 1..50: mol_type = other DNA
aggcgcgtcaggcgggcctcctaagttgggccgccgcccaggccggcaca

SEQ ID NO: 23088 - DNA, 50 bp, synthetic construct
  source 1..50: mol_type = other DNA
aacttttcttgaaacttctctctcaagttctcccgcactttggcaattct

SEQ ID NO: 23089 - DNA, 50 bp, synthetic construct
  source 1..50: mol_type = other DNA
catttgaggtagattccgatttatggccgtgctctggctatcagttgttc

SEQ ID NO: 23090 - DNA, 50 bp, synthetic construct
  source 1..50: mol_type = other DNA
cgccggccgcgcgcgggcccagaagggcctcagcccaacgaacccttacg

SEQ ID NO: 23091 - DNA, 50 bp, synthetic construct
  source 1..50: mol_type = other DNA
cggcgagcaccccccgggttcaggaagactagctccgggtcgggcacctg

SEQ ID NO: 23092 - DNA, 50 bp, synthetic construct
  source 1..50: mol_type = other DNA
ggtcgcggcttaggggcggggcgccccgcgccctgtacaccgcatgcctt

SEQ ID NO: 23093 - DNA, 50 bp, synthetic construct
  source 1..50: mol_type = other DNA
atcagtcgcctccttttctttgattggtcctaagggagtcattgccgctc

SEQ ID NO: 23094 - DNA, 50 bp, synthetic construct
  source 1..50: mol_type = other DNA
gccgggcagggggaggctctgcgctggagtctagtctgcaccgctgggcg

SEQ ID NO: 23095 - DNA, 50 bp, synthetic construct
  source 1..50: mol_type = other DNA
tgaacgccggggcccaaggagggccccgatgcggacagactcgcagcgaa

SEQ ID NO: 23096 - DNA, 50 bp, synthetic construct
  source 1..50: mol_type = other DNA
atcgccacctagtgagccgagcacgcagctacttcttgcgtcgatcgacg

SEQ ID NO: 23097 - DNA, 50 bp, synthetic construct
  source 1..50: mol_type = other DNA
aatcatgaacctaccctctggcggacccttatggcccacgacatccgaaa

SEQ ID NO: 23098 - DNA, 50 bp, synthetic construct
  source 1..50: mol_type = other DNA
cagatgccggtatggtgggacttgcgcgggctagagcagactagagcctt

SEQ ID NO: 23099 - DNA, 50 bp, synthetic construct
  source 1..50: mol_type = other DNA
aaggacgtgggcatgggggcaccagaaacttatttcagactcacccgccg

SEQ ID NO: 23100 - DNA, 50 bp, synthetic construct
  source 1..50: mol_type = other DNA
caattcgacctcggagccaccggtacgaagaacggggaacccggaggggg

SEQ ID NO: 23101 - DNA, 50 bp, synthetic construct
  source 1..50: mol_type = other DNA
acgccacgtgcggagggacctgttcaaggaccgaagacactcgtggcacg

SEQ ID NO: 23102 - DNA, 50 bp, synthetic construct
  source 1..50: mol_type = other DNA
aagttcgaggattcggtgacggacgaccactgggaccggcgggtggaggg

SEQ ID NO: 23103 - DNA, 50 bp, synthetic construct
  source 1..50: mol_type = other DNA
acgggttgcgcgacaggcgggactcgctggacgtgcgcgtgttcgaagcc

SEQ ID NO: 23104 - DNA, 50 bp, synthetic construct
  source 1..50: mol_type = other DNA
ccaattcccggtgccgttcttccaccggctgcgcgactggttgcggcacc

SEQ ID NO: 23105 - DNA, 50 bp, synthetic construct
  source 1..50: mol_type = other DNA
aaggacaggaaggggtggtggttctggatgaagggcgtgaagctggactc

SEQ ID NO: 23106 - DNA, 50 bp, synthetic construct
  source 1..50: mol_type = other DNA
tccggcggaccccattccagccgcgcgtgcgaccgctcataccacgcctc

SEQ ID NO: 23107 - DNA, 50 bp, synthetic construct
  source 1..50: mol_type = other DNA
gaccaggggtgtctgagtctctcttgggtggtaccacgacagaggacggc

SEQ ID NO: 23108 - DNA, 50 bp, synthetic construct
  source 1..50: mol_type = other DNA
catcggcaaggaggacgggcgacccggagggttgcccgggaggaggggag

SEQ ID NO: 23109 - DNA, 50 bp, synthetic construct
  source 1..50: mol_type = other DNA
acctgttcaaggaccgaagacactcgtggcacgactggaggtttatggca

SEQ ID NO: 23110 - DNA, 50 bp, synthetic construct
  source 1..50: mol_type = other DNA
gacggacgaccactgggaccggcgggtggaggggcggctcaagtggggac

SEQ ID NO: 23111 - DNA, 50 bp, synthetic construct
  source 1..50: mol_type = other DNA
cgggactcgctggacgtgcgcgtgttcgaagcccacctgggccagttgaa

SEQ ID NO: 23112 - DNA, 50 bp, synthetic construct
  source 1..50: mol_type = other DNA
tcttccaccggctgcgcgactggttgcggcaccgcgtgcacctgctgtac

SEQ ID NO: 23113 - DNA, 50 bp, synthetic construct
  source 1..50: mol_type = other DNA
gtggttctggatgaagggcgtgaagctggactcggtgccgagacgggtcc

SEQ ID NO: 23114 - DNA, 50 bp, synthetic construct
  source 1..50: mol_type = other DNA
cagccgcgcgtgcgaccgctcataccacgcctccgggacctctcctacaa

SEQ ID NO: 23115 - DNA, 50 bp, synthetic construct
  source 1..50: mol_type = other DNA
tctctcttgggtggtaccacgacagaggacggctgttctggttgcagttc

SEQ ID NO: 23116 - DNA, 50 bp, synthetic construct
  source 1..50: mol_type = other DNA
ccggaactcgtagacctaagacggattattttttgtaaataaaagtaacg

SEQ ID NO: 23117 - DNA, 50 bp, synthetic construct
  source 1..50: mol_type = other DNA
ggttaaagataatttccaaggaaacaagggattcaggttgatgatttgac

SEQ ID NO: 23118 - DNA, 50 bp, synthetic construct
  source 1..50: mol_type = other DNA
tttcaccaccgaccacaccgattacgggaccgggtgttcatagtgattcg

SEQ ID NO: 23119 - DNA, 50 bp, synthetic construct
  source 1..50: mol_type = other DNA
accagacacacgaccgggtagtgaaaccgtttcttaagtggggtggtcac

SEQ ID NO: 23120 - DNA, 50 bp, synthetic construct
  source 1..50: mol_type = other DNA
ctcactcgacgtgacactgttcgacgtgcacctaggactcttgaagtccg

SEQ ID NO: 23121 - DNA, 50 bp, synthetic construct
  source 1..50: mol_type = other DNA
cacgagccacggaaatcactaccggaccgagtggacctgttggagttccc

SEQ ID NO: 23122 - DNA, 50 bp, synthetic construct
  source 1..50: mol_type = other DNA
aacccctagacaggtgaggactacgacaatacccgttgggattccacttc

SEQ ID NO: 23123 - DNA, 50 bp, synthetic construct
  source 1..50: mol_type = other DNA
accaccactccgggacccgtccgacgaccaccagatgggaacctgggtct

SEQ ID NO: 23124 - DNA, 50 bp, synthetic construct
  source 1..50: mol_type = other DNA
gtagactgaggactcctcttcagacggcaatgacgggacaccccgttcca

SEQ ID NO: 23125 - DNA, 50 bp, synthetic construct
  source 1..50: mol_type = other DNA
aaataagacgttcgttatgtttattatttagataagacgactctctagtg

SEQ ID NO: 23126 - DNA, 50 bp, synthetic construct
  source 1..50: mol_type = other DNA
gtcacgggacaggaggtctatggtgactcgagtgacgggtactaagtctc

SEQ ID NO: 23127 - DNA, 50 bp, synthetic construct
  source 1..50: mol_type = other DNA
gtaaagccgtttcttaagtggggactccacgtccgaaggaccgtcttcta

SEQ ID NO: 23128 - DNA, 50 bp, synthetic construct
  source 1..50: mol_type = other DNA
tcgacgtacacctaggactcttgaagttcgaggaccctttacacgaccac

SEQ ID NO: 23129 - DNA, 50 bp, synthetic construct
  source 1..50: mol_type = other DNA
acggtgtttcgtggacctactagagttcccgtggaaacgggtcgactcac

SEQ ID NO: 23130 - DNA, 50 bp, synthetic construct
  source 1..50: mol_type = other DNA
agacggtagtacccgttggggtttcagttccgtgtaccgttcttccacga

SEQ ID NO: 23131 - DNA, 50 bp, synthetic construct
  source 1..50: mol_type = other DNA
ccgaggaccaacagatgggtacctgggtctccaagaaactgtcgaaaccg

SEQ ID NO: 23132 - DNA, 50 bp, synthetic construct
  source 1..50: mol_type = other DNA
ccgatgatagtgttcggacaccccgttccacttacaccttctacgacctc

SEQ ID NO: 23133 - DNA, 50 bp, synthetic construct
  source 1..50: mol_type = other DNA
ttgcagactccaatagttattcgaggatcaggtctgcggtacccagtaaa

SEQ ID NO: 23134 - DNA, 50 bp, synthetic construct
  source 1..50: mol_type = other DNA
gaaataagacgttcgttagtttattatttagataagacgattctctagtg

SEQ ID NO: 23135 - DNA, 50 bp, synthetic construct
  source 1..50: mol_type = other DNA
ggtcacgggacaggaggtctatggtgactcgagtgacgggtactacgtct

SEQ ID NO: 23136 - DNA, 50 bp, synthetic construct
  source 1..50: mol_type = other DNA
ggtaaagccgtttcttaagtggggactccacgtccgaaggaccgtcttct

SEQ ID NO: 23137 - DNA, 50 bp, synthetic construct
  source 1..50: mol_type = other DNA
ttcgacgtacacctaggactcttgaagttcgaggaccctttacacgacca

SEQ ID NO: 23138 - DNA, 50 bp, synthetic construct
  source 1..50: mol_type = other DNA
tacggtatttcgtggacctactagagttcccgtggaaacgggtcgactca

SEQ ID NO: 23139 - DNA, 50 bp, synthetic construct
  source 1..50: mol_type = other DNA
gagacggtagtacccgttggggtttcagttccgtgtaccgttcttccacg

SEQ ID NO: 23140 - DNA, 50 bp, synthetic construct
  source 1..50: mol_type = other DNA
tccgaggaccaacagatgggtacctgggtctccaagaaactgtcgaaacc

SEQ ID NO: 23141 - DNA, 50 bp, synthetic construct
  source 1..50: mol_type = other DNA
tccgatgatagtgttcggacaccccgttccacttacaccttctacgacct

SEQ ID NO: 23142 - DNA, 50 bp, synthetic construct
  source 1..50: mol_type = other DNA
cttgcagactccaatagttattcgaggatcaggtctgcggtacccagtaa

SEQ ID NO: 23143 - DNA, 50 bp, synthetic construct
  source 1..50: mol_type = other DNA
gctaccatcacaccccagaggggtacgctctcatcccttgacggtccgta

SEQ ID NO: 23144 - DNA, 50 bp, synthetic construct
  source 1..50: mol_type = other DNA
ccgccggcatcgcgccaccagggtggactggggtacggcttgagtcttca

SEQ ID NO: 23145 - DNA, 50 bp, synthetic construct
  source 1..50: mol_type = other DNA
tgaatggtgaaacactaagtactgaccccacttcagcattgttccattgg

SEQ ID NO: 23146 - DNA, 50 bp, synthetic construct
  source 1..50: mol_type = other DNA
tgtggcgggcagtgtggtaccctcacccaacgttttcttcatccatcgaa

SEQ ID NO: 23147 - DNA, 50 bp, synthetic construct
  source 1..50: mol_type = other DNA
cttcagccttagcgatcattagcacctagtcttacggtgccacttatgca

SEQ ID NO: 23148 - DNA, 50 bp, synthetic construct
  source 1..50: mol_type = other DNA
cgctctcgttcgcctggagtatttcacgcagcatcaggcctaacctcaga

SEQ ID NO: 23149 - DNA, 50 bp, synthetic construct
  source 1..50: mol_type = other DNA
tagtaccgggaatgctggtcccgatgtgtgcacgatgttaccgcgtatgt

SEQ ID NO: 23150 - DNA, 50 bp, synthetic construct
  source 1..50: mol_type = other DNA
ggccggcccttgagtttcctctgacggtcactatttgacctccttccacc

SEQ ID NO: 23151 - DNA, 50 bp, synthetic construct
  source 1..50: mol_type = other DNA
gcacaacactttacaacccaattcagggcgttgctcgcgttgggaatagg

SEQ ID NO: 23152 - DNA, 50 bp, synthetic construct
  source 1..50: mol_type = other DNA
caaaagtctctactcttacacggaagcccttggcactctgtccacgacgt

SEQ ID NO: 23153 - DNA, 50 bp, synthetic construct
  source 1..50: mol_type = other DNA
ccacctcgtacaccaaattaagctacgttgcgcttcttggaatggaccag

SEQ ID NO: 23154 - DNA, 50 bp, synthetic construct
  source 1..50: mol_type = other DNA
gctggcggacccctcatgccggcgttccaattttgagtttacttaactgc

SEQ ID NO: 23155 - DNA, 50 bp, synthetic construct
  source 1..50: mol_type = other DNA
gcatttgctacagctgaacctccaacacgggaactccgcaccgaaggcct

SEQ ID NO: 23156 - DNA, 50 bp, synthetic construct
  source 1..50: mol_type = other DNA
cttctgactgcgagtcacgctttcgcacccctcgtttgtcctaatctatg

SEQ ID NO: 23157 - DNA, 50 bp, synthetic construct
  source 1..50: mol_type = other DNA
gtccacatcgccactttacgcatctctagacctccttatggccaccgctt

SEQ ID NO: 23158 - DNA, 50 bp, synthetic construct
  source 1..50: mol_type = other DNA
cccgagttggacccttgacgtagactatgaccgttcgaactcagagcatc

SEQ ID NO: 23159 - DNA, 50 bp, synthetic construct
  source 1..50: mol_type = other DNA
caattagccttaatgacccgcatttcgcgtgcgtccgccaaacaattcag

SEQ ID NO: 23160 - DNA, 50 bp, synthetic construct
  source 1..50: mol_type = other DNA
aatgggcgtcttcttcgtggccgattgaggcacggtcgtcggcgccatta

SEQ ID NO: 23161 - DNA, 50 bp, synthetic construct
  source 1..50: mol_type = other DNA
aagcccaacatttcatgaaagtcgcccctccttccctcatttcaattatg

SEQ ID NO: 23162 - DNA, 50 bp, synthetic construct
  source 1..50: mol_type = other DNA
gtcaccccttatgacgtgttacccgcgttcggactacgtcggtacggcgc

SEQ ID NO: 23163 - DNA, 50 bp, synthetic construct
  source 1..50: mol_type = other DNA
gaccagactctcctactggtcggtgtgaccttgactctgtgccaggtctg

SEQ ID NO: 23164 - DNA, 50 bp, synthetic construct
  source 1..50: mol_type = other DNA
gcctacacgggtctaccctaatcgatcatccaccccattgccgagtggat

SEQ ID NO: 23165 - DNA, 50 bp, synthetic construct
  source 1..50: mol_type = other DNA
tttgccatcgattatggcgtattgcagcgttctggtttctccccctggaa

SEQ ID NO: 23166 - DNA, 50 bp, synthetic construct
  source 1..50: mol_type = other DNA
gactgctcaccgcctgcccactcattacagaccctttgacggactacctc

SEQ ID NO: 23167 - DNA, 50 bp, synthetic construct
  source 1..50: mol_type = other DNA
gtcgctacgcaactcgattggccatgattacttggcactccgaattggaa

SEQ ID NO: 23168 - DNA, 50 bp, synthetic construct
  source 1..50: mol_type = other DNA
actgggaaattcccaggacttccttgcaacttctgctgctgcaactatcc

SEQ ID NO: 23169 - DNA, 50 bp, synthetic construct
  source 1..50: mol_type = other DNA
tttacgccttctctattcacgactttcgtagattcgtgctttgaacgggg

SEQ ID NO: 23170 - DNA, 50 bp, synthetic construct
  source 1..50: mol_type = other DNA
tctcctggcctcacctgcgtagtgaccacaagcccaacagtacggttacc

SEQ ID NO: 23171 - DNA, 50 bp, synthetic construct
  source 1..50: mol_type = other DNA
cactctgtcaagccagggatagacggcacccgcgacctcttgactccccc

SEQ ID NO: 23172 - DNA, 50 bp, synthetic construct
  source 1..50: mol_type = other DNA
ttcatccagggttcccataccgacaagcggtaaatttcaccatgcgctcg

SEQ ID NO: 23173 - DNA, 50 bp, synthetic construct
  source 1..50: mol_type = other DNA
gggttctcaagtatagctgccgccacaaaccgtggagctacagccgagta

SEQ ID NO: 23174 - DNA, 50 bp, synthetic construct
  source 1..50: mol_type = other DNA
caagacttaccttcccggtagcgagttgcctattttccatgaggccccta

SEQ ID NO: 23175 - DNA, 50 bp, synthetic construct
  source 1..50: mol_type = other DNA
ttcggtcgaactgacgctcgcactgccgcgctcgtccacgctttcgtcca

SEQ ID NO: 23176 - DNA, 50 bp, synthetic construct
  source 1..50: mol_type = other DNA
tcattgcctcctcgtgcttccaaccgattaggaccagcctgtagtcctcc

SEQ ID NO: 23177 - DNA, 50 bp, synthetic construct
  source 1..50: mol_type = other DNA
tgggcattaggcccaacgcctgtcacagaccacccatcaaactgaccccg

SEQ ID NO: 23178 - DNA, 50 bp, synthetic construct
  source 1..50: mol_type = other DNA
cctgcggtcagacgtacctcggctggaactttatggtgggaaattacaaa

SEQ ID NO: 23179 - DNA, 50 bp, synthetic construct
  source 1..50: mol_type = other DNA
aatgatatcgaactgtgacttgtaactcggaactacacatcctatccacc

SEQ ID NO: 23180 - DNA, 50 bp, synthetic construct
  source 1..50: mol_type = other DNA
cactttaacttgagcgacacttctacgtcacatgggcgccgttctgcctt

SEQ ID NO: 23181 - DNA, 50 bp, synthetic construct
  source 1..50: mol_type = other DNA
cagcccattcaaggctggacgtgcttaccgcattactaccggtccgacag

SEQ ID NO: 23182 - DNA, 50 bp, synthetic construct
  source 1..50: mol_type = other DNA
agaactagcttcggggccatttgccgccggcattgatattgccaggattc

SEQ ID NO: 23183 - DNA, 50 bp, synthetic construct
  source 1..50: mol_type = other DNA
tgcatatgccacactgcggacgggccacggccttccaattaactacccca

SEQ ID NO: 23184 - DNA, 50 bp, synthetic construct
  source 1..50: mol_type = other DNA
cagcttctatggtcgaccgacgttgacaaataatttttgtgtcgtgacac

SEQ ID NO: 23185 - DNA, 50 bp, synthetic construct
  source 1..50: mol_type = other DNA
ggcattgaagccctcttccgtgcgactatacatccactccagggagcgcc

SEQ ID NO: 23186 - DNA, 50 bp, synthetic construct
  source 1..50: mol_type = other DNA
caccagtccatctcttatggttccgcgaactctcttgagcccacttcctt

SEQ ID NO: 23187 - DNA, 50 bp, synthetic construct
  source 1..50: mol_type = other DNA
cgggacgaaggtccttttcggagattcgtagtccattgtagtttagcatg

SEQ ID NO: 23188 - DNA, 50 bp, synthetic construct
  source 1..50: mol_type = other DNA
tccgtttaggccttttagttccgactccgcactactgctccgtgatgcca

SEQ ID NO: 23189 - DNA, 50 bp, synthetic construct
  source 1..50: mol_type = other DNA
cctgcctcttccgatacaaccggcccgctgccaacagggccaaattcgca

SEQ ID NO: 23190 - DNA, 50 bp, synthetic construct
  source 1..50: mol_type = other DNA
ccggctttccgcatcagctaccctttgtccaattataaggacatgaacca

SEQ ID NO: 23191 - DNA, 50 bp, synthetic construct
  source 1..50: mol_type = other DNA
gcggccttctggttcccaaggacaggttgcaattagccccgtcccactca

SEQ ID NO: 23192 - DNA, 50 bp, synthetic construct
  source 1..50: mol_type = other DNA
tacgacctccatagtcttcacgcttacgactgtattcattgctatttcgc

SEQ ID NO: 23193 - DNA, 50 bp, synthetic construct
  source 1..50: mol_type = other DNA
tcgctgcgaatacgcaacaacccatcccctcgcaagacattcggacgctt

SEQ ID NO: 23194 - DNA, 50 bp, synthetic construct
  source 1..50: mol_type = other DNA
gagtgaccagctcagccggacgcgccttctacattgccccgatttggtac

SEQ ID NO: 23195 - DNA, 50 bp, synthetic construct
  source 1..50: mol_type = other DNA
acccttccgggtctgtcggtcctacaaccgaatcttcgtcggtagtaaat

SEQ ID NO: 23196 - DNA, 50 bp, synthetic construct
  source 1..50: mol_type = other DNA
acttctccctttgttgggtctggcggtcgattccagggtttcagtaccaa

SEQ ID NO: 23197 - DNA, 50 bp, synthetic construct
  source 1..50: mol_type = other DNA
tacgtttgacgcttatggcctcttacaatagtgccctctgtgtgccgccc

SEQ ID NO: 23198 - DNA, 50 bp, synthetic construct
  source 1..50: mol_type = other DNA
gcacttaagtagaggcccccatctcgtgacaaagccgttcccccagtagg

SEQ ID NO: 23199 - DNA, 50 bp, synthetic construct
  source 1..50: mol_type = other DNA
ccccactttccggttagtttggccctctatcgaccaagaggggctttcga

SEQ ID NO: 23200 - DNA, 50 bp, synthetic construct
  source 1..50: mol_type = other DNA
acccattgtgattgacctcctggcttggctgattacaactttttaatcgc

SEQ ID NO: 23201 - DNA, 50 bp, synthetic construct
  source 1..50: mol_type = other DNA
gacccgcaattcaacgtcccatatctgggctttgggccactagatcggta

SEQ ID NO: 23202 - DNA, 50 bp, synthetic construct
  source 1..50: mol_type = other DNA
agtcgctgaatataagacatcgttccaattggcttatcccctcggcttcc

SEQ ID NO: 23203 - DNA, 50 bp, synthetic construct
  source 1..50: mol_type = other DNA
tggcacatgcatgttcgtcaccctcgtgcgaatccgcacactgacgcatg

SEQ ID NO: 23204 - DNA, 50 bp, synthetic construct
  source 1..50: mol_type = other DNA
cacttggtcatggcactccctttccgcttttcttggggccgctcccctca

SEQ ID NO: 23205 - DNA, 50 bp, synthetic construct
  source 1..50: mol_type = other DNA
gcaccataggacagacttatacccccctggtaggaggttccgatttatga

SEQ ID NO: 23206 - DNA, 50 bp, synthetic construct
  source 1..50: mol_type = other DNA
tatgtcccactgtcggggcatgtgtttttacgtgtacgacactcgagcta

SEQ ID NO: 23207 - DNA, 50 bp, synthetic construct
  source 1..50: mol_type = other DNA
ttgcccctcgtcgggtctcggacttagtcacacacacaatcaccttcgca

SEQ ID NO: 23208 - DNA, 50 bp, synthetic construct
  source 1..50: mol_type = other DNA
ttgactttgtagattcatggggctccttttctttagttggctctaagggg

SEQ ID NO: 23209 - DNA, 50 bp, synthetic construct
  source 1..50: mol_type = other DNA
tttgggtcacacaaagctgtgtgatagtaattgacttaggtatccaatta

SEQ ID NO: 23210 - DNA, 50 bp, synthetic construct
  source 1..50: mol_type = other DNA
cgattagacgctattcgcagccattccactatacttggcaatattggccg

SEQ ID NO: 23211 - DNA, 50 bp, synthetic construct
  source 1..50: mol_type = other DNA
cggctaccatcagcccccaaagggggacactctcatcctgcggcggttcg

SEQ ID NO: 23212 - DNA, 50 bp, synthetic construct
  source 1..50: mol_type = other DNA
aaccaccgctatcgcttctccagtgtgggcaagggtatggcttgtgcctt

SEQ ID NO: 23213 - DNA, 50 bp, synthetic construct
  source 1..50: mol_type = other DNA
gcattgttccatcggcatagccttccacgccgacctagtggaggaaagat

SEQ ID NO: 23214 - DNA, 50 bp, synthetic construct
  source 1..50: mol_type = other DNA
cttcagccactccattggaaaatcctcggtcggcggcttccaccctgtct

SEQ ID NO: 23215 - DNA, 50 bp, synthetic construct
  source 1..50: mol_type = other DNA
gcgccacttatgcaagggcccggaacatgtgtggcgggcagtgtggtgct

SEQ ID NO: 23216 - DNA, 50 bp, synthetic construct
  source 1..50: mol_type = other DNA
agcctagcgtcagacgttgagctgacgcacttcgaccttagcgatcatta

SEQ ID NO: 23217 - DNA, 50 bp, synthetic construct
  source 1..50: mol_type = other DNA
gttacctgtcttgtttcccgtcgctttggcgctccaattcggttagggtg

SEQ ID NO: 23218 - DNA, 50 bp, synthetic construct
  source 1..50: mol_type = other DNA
ggcctccttccacccctactgcagtttagtagtacggggaatactggacc

SEQ ID NO: 23219 - DNA, 50 bp, synthetic construct
  source 1..50: mol_type = other DNA
cgcgttgggaactagaatcaacggtcgtaagtcaacccgtgagattccac

SEQ ID NO: 23220 - DNA, 50 bp, synthetic construct
  source 1..50: mol_type = other DNA
cactgtccaccacgtaccaacagcagtcgagcacagcactctacaaccca

SEQ ID NO: 23221 - DNA, 50 bp, synthetic construct
  source 1..50: mol_type = other DNA
cttggaatggtccagaactgtaggagactgttaggatctctatcctgcag

SEQ ID NO: 23222 - DNA, 50 bp, synthetic construct
  source 1..50: mol_type = other DNA
agtttccttaactgcccccgggcgtgttcgccacctcgtacaccaaatta

SEQ ID NO: 23223 - DNA, 50 bp, synthetic construct
  source 1..50: mol_type = other DNA
ggggaatcacgacgtcgattgcgtaattcgtgaggcggacccctcatgcc

SEQ ID NO: 23224 - DNA, 50 bp, synthetic construct
  source 1..50: mol_type = other DNA
tgtcctaatctatgggaccatcaggtgcggcatttgctactcacgattca

SEQ ID NO: 23225 - DNA, 50 bp, synthetic construct
  source 1..50: mol_type = other DNA
gtggtcaccgcttccgctgagagaccagacattgactgcgactcctcgct

SEQ ID NO: 23226 - DNA, 50 bp, synthetic construct
  source 1..50: mol_type = other DNA
aactcacgtcttctcctctcaccttaaggtgcacatcgccactttacgca

SEQ ID NO: 23227 - DNA, 50 bp, synthetic construct
  source 1..50: mol_type = other DNA
ccaaagaattcagactacactttcgggggccgagttggcccctcccagta

SEQ ID NO: 23228 - DNA, 50 bp, synthetic construct
  source 1..50: mol_type = other DNA
gtcggcgccattatgcatccaccgttcgcaacaggccttaataacccgca

SEQ ID NO: 23229 - DNA, 50 bp, synthetic construct
  source 1..50: mol_type = other DNA
tggcaagcttatcccgccatggaactgccatggattggtctttcggtgcc

SEQ ID NO: 23230 - DNA, 50 bp, synthetic construct
  source 1..50: mol_type = other DNA
tcgttgcggcgcactcactacttccaaaagcctagcatttcgagacaaca

SEQ ID NO: 23231 - DNA, 50 bp, synthetic construct
  source 1..50: mol_type = other DNA
gtgccgggtctgaggatgccctccgtcgtcatcccttagaaggcgttacc

SEQ ID NO: 23232 - DNA, 50 bp, synthetic construct
  source 1..50: mol_type = other DNA
tgccgagtggttccgctgctacgcatcggctggactctcccactagccgg

SEQ ID NO: 23233 - DNA, 50 bp, synthetic construct
  source 1..50: mol_type = other DNA
tattttccaccgaagccgatggtgaatgtctacctgggcgccgcgtaatc

SEQ ID NO: 23234 - DNA, 50 bp, synthetic construct
  source 1..50: mol_type = other DNA
ctgaccctattgaggccctttggccccgattatggcctaccaacaaactt

SEQ ID NO: 23235 - DNA, 50 bp, synthetic construct
  source 1..50: mol_type = other DNA
taccctcgaacgagggactacaatcgccgcctgcccactcattgtgcacc

SEQ ID NO: 23236 - DNA, 50 bp, synthetic construct
  source 1..50: mol_type = other DNA
ctcaaactaggaccgagtcctgcttgcgaccgccgcacggattatgtacg

SEQ ID NO: 23237 - DNA, 50 bp, synthetic construct
  source 1..50: mol_type = other DNA
acaccgctgtgtacctcgactgtctatgattagctagctcctgaattggt

SEQ ID NO: 23238 - DNA, 50 bp, synthetic construct
  source 1..50: mol_type = other DNA
aaagggtaaggcgttccttcattctagggactttctactagtccaactat

SEQ ID NO: 23239 - DNA, 50 bp, synthetic construct
  source 1..50: mol_type = other DNA
catcgatacacgcctgccctattcacgactttcgtagattcgtacttcgg

SEQ ID NO: 23240 - DNA, 50 bp, synthetic construct
  source 1..50: mol_type = other DNA
tcatgctctcctggccctacctgcgtggcgaccacatggtcaacaagacg

SEQ ID NO: 23241 - DNA, 50 bp, synthetic construct
  source 1..50: mol_type = other DNA
ttgcagcactctgtcaagccagggataggcagcgcccgcgtcctttaaac

SEQ ID NO: 23242 - DNA, 50 bp, synthetic construct
  source 1..50: mol_type = other DNA
cccgacatcagtcagggttcccaacccgacaagcgggtaatttcgccatg

SEQ ID NO: 23243 - DNA, 50 bp, synthetic construct
  source 1..50: mol_type = other DNA
tagagggggttctcaggtgtagctgcccctccaaaccgtggagctacagc

SEQ ID NO: 23244 - DNA, 50 bp, synthetic construct
  source 1..50: mol_type = other DNA
ggccaccaaggcgtaccttcccggtagcgagttgcctattttcgatgggg

SEQ ID NO: 23245 - DNA, 50 bp, synthetic construct
  source 1..50: mol_type = other DNA
tccgtgttccctcgaactgacgctctggatgttcagctcgtccctgcttt

SEQ ID NO: 23246 - DNA, 50 bp, synthetic construct
  source 1..50: mol_type = other DNA
gattttccattgcctccgcgggtttccaagggagtcttaccaacctttag

SEQ ID NO: 23247 - DNA, 50 bp, synthetic construct
  source 1..50: mol_type = other DNA
tgggcggcgggaatagcccgcccctctgtcacagtccacccgtcaaactg

SEQ ID NO: 23248 - DNA, 50 bp, synthetic construct
  source 1..50: mol_type = other DNA
tttggcctcgcggtcgaagccacctccgtagccaccctatgatgggaccg

SEQ ID NO: 23249 - DNA, 50 bp, synthetic construct
  source 1..50: mol_type = other DNA
cctcgaaatgacgtcggactataacttacaaccatgtcgaacatgtccta

SEQ ID NO: 23250 - DNA, 50 bp, synthetic construct
  source 1..50: mol_type = other DNA
ctgagccactttaatatcatggacacttctacgtccaatgggcgctgtcc

SEQ ID NO: 23251 - DNA, 50 bp, synthetic construct
  source 1..50: mol_type = other DNA
aaggaacagcccattcaaggctgggcgtgctttccgcgttgctagacccg

SEQ ID NO: 23252 - DNA, 50 bp, synthetic construct
  source 1..50: mol_type = other DNA
gcttccacgcttaacttcggggtcatttgccgccggcattgatattgcca

SEQ ID NO: 23253 - DNA, 50 bp, synthetic construct
  source 1..50: mol_type = other DNA
ttccgcttcatatccccgactgcggacgggccacgaccttccaattctcc

SEQ ID NO: 23254 - DNA, 50 bp, synthetic construct
  source 1..50: mol_type = other DNA
ctctctcggcgtcacttatccgggtccgctgacaaatcgtttttgtgtcc

SEQ ID NO: 23255 - DNA, 50 bp, synthetic construct
  source 1..50: mol_type = other DNA
attccttgagccgttttactggggcattgaagccctcttccccacgagac

SEQ ID NO: 23256 - DNA, 50 bp, synthetic construct
  source 1..50: mol_type = other DNA
gggcatggcgtttggctgtgtccatccgctcctctcttaggattccacta

SEQ ID NO: 23257 - DNA, 50 bp, synthetic construct
  source 1..50: mol_type = other DNA
ctttatatcatcgcttcaaggactaaggtgtgacggttcttttcggagat

SEQ ID NO: 23258 - DNA, 50 bp, synthetic construct
  source 1..50: mol_type = other DNA
aggttcgtcaatccgaccctttatccgtttaggcaaagggtattccgact

SEQ ID NO: 23259 - DNA, 50 bp, synthetic construct
  source 1..50: mol_type = other DNA
aggagtggtaaactcgttacccccctgcgtcctcctatcccattcgcgcc

SEQ ID NO: 23260 - DNA, 50 bp, synthetic construct
  source 1..50: mol_type = other DNA
agccctggattcggctccggctttccgcatccgctacctgttgtccaact

SEQ ID NO: 23261 - DNA, 50 bp, synthetic construct
  source 1..50: mol_type = other DNA
cccactcttaggggaggtggcttacggattccaaaggactccttccgagc

SEQ ID NO: 23262 - DNA, 50 bp, synthetic construct
  source 1..50: mol_type = other DNA
ttcggtctggccttcctgaccacctcgcgaatcttcactcttacggccat

SEQ ID NO: 23263 - DNA, 50 bp, synthetic construct
  source 1..50: mol_type = other DNA
tttgcatagtggcttcgacgcctgacaagaagcttgtcaccatcctctcg

SEQ ID NO: 23264 - DNA, 50 bp, synthetic construct
  source 1..50: mol_type = other DNA
tggtaaatttctcacgcattatcgagtgaccagctcactgagacgcggct

SEQ ID NO: 23265 - DNA, 50 bp, synthetic construct
  source 1..50: mol_type = other DNA
atatgcaattcaccttttcctacacctcaacgaatctgttggtcctacaa

SEQ ID NO: 23266 - DNA, 50 bp, synthetic construct
  source 1..50: mol_type = other DNA
tgacgctcactattctaggcatcagctttccctttgtcgggtctggcggt

SEQ ID NO: 23267 - DNA, 50 bp, synthetic construct
  source 1..50: mol_type = other DNA
ccggggatggcccaatggcttaagtcagtttgaggcttacggttactgaa

SEQ ID NO: 23268 - DNA, 50 bp, synthetic construct
  source 1..50: mol_type = other DNA
ggctttatcgaaatcccgatcggagttccattctcagaacctccatctcg

SEQ ID NO: 23269 - DNA, 50 bp, synthetic construct
  source 1..50: mol_type = other DNA
ttcacgcccctactccacacccatccccactttacggttagcttggacct

SEQ ID NO: 23270 - DNA, 50 bp, synthetic construct
  source 1..50: mol_type = other DNA
agatgggtacaggtcccacttcaagtccattgtgacttacctccgggctt

SEQ ID NO: 23271 - DNA, 50 bp, synthetic construct
  source 1..50: mol_type = other DNA
cggcgtcgctttcgctcagacttatcccgcgtactcatgcaccagcatct

SEQ ID NO: 23272 - DNA, 50 bp, synthetic construct
  source 1..50: mol_type = other DNA
cgcacggaaaacatcttacttggccgctcaatgctagggcacgttccaat

SEQ ID NO: 23273 - DNA, 50 bp, synthetic construct
  source 1..50: mol_type = other DNA
tcccctcactttctctaggactttggcacacggatgttcatcagtctcgg

SEQ ID NO: 23274 - DNA, 50 bp, synthetic construct
  source 1..50: mol_type = other DNA
gatttatgagggatcactggctatcacttggtcatggcactccctttcca

SEQ ID NO: 23275 - DNA, 50 bp, synthetic construct
  source 1..50: mol_type = other DNA
cacctaggactcatgccgccttgtgcactttaaggcagccttaggccctc

SEQ ID NO: 23276 - DNA, 50 bp, synthetic construct
  source 1..50: mol_type = other DNA
tctccagacctttccgggcggtatcctccattgtcgggacatcagttttg

SEQ ID NO: 23277 - DNA, 50 bp, synthetic construct
  source 1..50: mol_type = other DNA
ttctccgaacggagaaccccaacatcctgtgagacatgcctcaatgtttc

SEQ ID NO: 23278 - DNA, 50 bp, synthetic construct
  source 1..50: mol_type = other DNA
gcctccttctctttcgtttacgctaagggactcatcgccgctcgctttgc

SEQ ID NO: 23279 - DNA, 50 bp, synthetic construct
  source 1..50: mol_type = other DNA
cataggtatagacttaagtatcctatactcttccgtctgggccccttgac

SEQ ID NO: 23280 - DNA, 50 bp, synthetic construct
  source 1..50: mol_type = other DNA
ctcgacattcgttcgaaactaggcctctaaaggcttacccctttgggtgg

SEQ ID NO: 23281 - DNA, 50 bp, synthetic construct
  source 1..50: mol_type = other DNA
gcgtgccacctacggaaccgtgatcctcggctacttcctgccctgcttgt

SEQ ID NO: 23282 - DNA, 50 bp, synthetic construct
  source 1..50: mol_type = other DNA
ttttccctaacctactcctacattacaaaacaatataagcttagatcaaa

SEQ ID NO: 23283 - DNA, 50 bp, synthetic construct
  source 1..50: mol_type = other DNA
cgcacagtgttagcgcgccacttatgcagggacgaggaacgtgtgtggcg

SEQ ID NO: 23284 - DNA, 50 bp, synthetic construct
  source 1..50: mol_type = other DNA
gttgtgcgcccgatgttaccgactctgttacccaaggctgcggctttccg

SEQ ID NO: 23285 - DNA, 50 bp, synthetic construct
  source 1..50: mol_type = other DNA
ggcggatactatttatcctccttcctcacctgctgccatccaggcatacg

SEQ ID NO: 23286 - DNA, 50 bp, synthetic construct
  source 1..50: mol_type = other DNA
gctcgctctgggtgcgagaatcaatggtcgcctaggaaaaaacctacggc

SEQ ID NO: 23287 - DNA, 50 bp, synthetic construct
  source 1..50: mol_type = other DNA
agttgcggcctgtagagtggtctccgctgtcgacatactatcggtccaac

SEQ ID NO: 23288 - DNA, 50 bp, synthetic construct
  source 1..50: mol_type = other DNA
ctgactttgaatttccttaaccgccccctcgtggtgttgcgcacctcgga

SEQ ID NO: 23289 - DNA, 50 bp, synthetic construct
  source 1..50: mol_type = other DNA
cgaaactcgacagggtcacggcttcccttcgacaattcaggcggcggacc

SEQ ID NO: 23290 - DNA, 50 bp, synthetic construct
  source 1..50: mol_type = other DNA
cgcgcttggcctaatctatgggcccatcaggatcgacatttgctacgcct

SEQ ID NO: 23291 - DNA, 50 bp, synthetic construct
  source 1..50: mol_type = other DNA
atcggccaaattattcagagaccactttaggacgtcgaattgacaccctt

SEQ ID NO: 23292 - DNA, 50 bp, synthetic construct
  source 1..50: mol_type = other DNA
aagaattgccctaccgaaaagtaatcacatttctcgaaaaccttattctc

SEQ ID NO: 23293 - DNA, 50 bp, synthetic construct
  source 1..50: mol_type = other DNA
ccccacgtcgtccgcgctttggaggcgttacactctttagcgctgccccc

SEQ ID NO: 23294 - DNA, 50 bp, synthetic construct
  source 1..50: mol_type = other DNA
ctagccatgcccaacactctcgttctcgggcctctaccttggactctgtt

SEQ ID NO: 23295 - DNA, 50 bp, synthetic construct
  source 1..50: mol_type = other DNA
aaagcggattcctacccagacgccggctaatccatcaaccaatccattac

SEQ ID NO: 23296 - DNA, 50 bp, synthetic construct
  source 1..50: mol_type = other DNA
gaccctttgacccctattatgacctatccgttaataaggacattaccaaa

SEQ ID NO: 23297 - DNA, 50 bp, synthetic construct
  source 1..50: mol_type = other DNA
tcaaatccgagcaccgcatgccgagtcattgtgcacctattggatgggaa

SEQ ID NO: 23298 - DNA, 50 bp, synthetic construct
  source 1..50: mol_type = other DNA
accagctggccaacagactattccgtcacggcccgtcgatgcgcgatcca

SEQ ID NO: 23299 - DNA, 50 bp, synthetic construct
  source 1..50: mol_type = other DNA
acctacacaatcatcagactccccttccaccgaggtcatgctctccttgc

SEQ ID NO: 23300 - DNA, 50 bp, synthetic construct
  source 1..50: mol_type = other DNA
agcgggtaatttccccttgcactcgacccaaatctggcagcactctgtcc

SEQ ID NO: 23301 - DNA, 50 bp, synthetic construct
  source 1..50: mol_type = other DNA
cgaacgatgaagctacagccaagaaaggtaggacccacacgtcgtcgtgg

SEQ ID NO: 23302 - DNA, 50 bp, synthetic construct
  source 1..50: mol_type = other DNA
tactgtctttttgatggagcccctattgacccaccagcgtccgttctcgg

SEQ ID NO: 23303 - DNA, 50 bp, synthetic construct
  source 1..50: mol_type = other DNA
gttctttaggtctccgctttcggcccggatcgcttggagtctcaggagga

SEQ ID NO: 23304 - DNA, 50 bp, synthetic construct
  source 1..50: mol_type = other DNA
aagcaagaactctgtggtgaaagaatactgacacaaagattgaatgaaac

SEQ ID NO: 23305 - DNA, 50 bp, synthetic construct
  source 1..50: mol_type = other DNA
ttcgaaccaatatccatacgtcacattcaccctcttaagctaatattcag

SEQ ID NO: 23306 - DNA, 50 bp, synthetic construct
  source 1..50: mol_type = other DNA
cgtgttcggtctcagaaggtaacccttcgcttctggggcatctcaaaatg

SEQ ID NO: 23307 - DNA, 50 bp, synthetic construct
  source 1..50: mol_type = other DNA
cgtacttaccatcttgctccaggggtgacagggatcgatcttgaatcact

SEQ ID NO: 23308 - DNA, 50 bp, synthetic construct
  source 1..50: mol_type = other DNA
tttgccgcccccattgatattgggagaattccatcgctttacggaacagc

SEQ ID NO: 23309 - DNA, 50 bp, synthetic construct
  source 1..50: mol_type = other DNA
tgtctcccgctgtggacgggtcacgaccgtgcacttcgacctcaagtcaa

SEQ ID NO: 23310 - DNA, 50 bp, synthetic construct
  source 1..50: mol_type = other DNA
gtcactgatccccccgggctgacaaattatttttgtatcgagagacgatc

SEQ ID NO: 23311 - DNA, 50 bp, synthetic construct
  source 1..50: mol_type = other DNA
tggctctaggcagtgtccacggggatcgactcatccgattccgcaaaatt

SEQ ID NO: 23312 - DNA, 50 bp, synthetic construct
  source 1..50: mol_type = other DNA
catgaccaaattgactaagtacctcaggaacttttccctcaatcaaaaca

SEQ ID NO: 23313 - DNA, 50 bp, synthetic construct
  source 1..50: mol_type = other DNA
caaattcggacccctctccacattatcgctcttggtccacatccgtaata

SEQ ID NO: 23314 - DNA, 50 bp, synthetic construct
  source 1..50: mol_type = other DNA
actgcaactcccgattaaagactgtgaagctctatacaaaacatcctaac

SEQ ID NO: 23315 - DNA, 50 bp, synthetic construct
  source 1..50: mol_type = other DNA
aaggaaacctggaacgtccatacacctaggaccatcatcatcgtcgtttc

SEQ ID NO: 23316 - DNA, 50 bp, synthetic construct
  source 1..50: mol_type = other DNA
ccttgtggaaaaaaaaccactaacacatctcaccgctggacacacccaac

SEQ ID NO: 23317 - DNA, 50 bp, synthetic construct
  source 1..50: mol_type = other DNA
gtctagtgggtagctccagtctccgtggattttacctgcccttaattagg

SEQ ID NO: 23318 - DNA, 50 bp, synthetic construct
  source 1..50: mol_type = other DNA
ctcagaaaccgggttctgttacccttccacccgaatcttcgtcggtggga

SEQ ID NO: 23319 - DNA, 50 bp, synthetic construct
  source 1..50: mol_type = other DNA
acacagggctttctctttgttgagtctgataccaattccggggatttatg

SEQ ID NO: 23320 - DNA, 50 bp, synthetic construct
  source 1..50: mol_type = other DNA
gcatgacattttgaggcttgagcagtggcagcatcttccaacctcactcc

SEQ ID NO: 23321 - DNA, 50 bp, synthetic construct
  source 1..50: mol_type = other DNA
cggactgacctccaaccaccgccccatctcgtgattaacctgcaaatccc

SEQ ID NO: 23322 - DNA, 50 bp, synthetic construct
  source 1..50: mol_type = other DNA
attatcccggaccttagtgtcgtaactttgggcttcggccagctagataa

SEQ ID NO: 23323 - DNA, 50 bp, synthetic construct
  source 1..50: mol_type = other DNA
tccaaaaataggaacatcagcatccctttggctatacgggcgtcgcaaca

SEQ ID NO: 23324 - DNA, 50 bp, synthetic construct
  source 1..50: mol_type = other DNA
ctgatcacaacgtagcaggcagaactttgtgcccggtccctcaagaaaca

SEQ ID NO: 23325 - DNA, 50 bp, synthetic construct
  source 1..50: mol_type = other DNA
acaccgcgcattccttacttaagaaggctttcttagtcaccattgtaaca

SEQ ID NO: 23326 - DNA, 50 bp, synthetic construct
  source 1..50: mol_type = other DNA
ccttacgacttttcatggggatatccccccacttttcatggactttggtc

SEQ ID NO: 23327 - DNA, 50 bp, synthetic construct
  source 1..50: mol_type = other DNA
acaccctccgtagttgaaggttaagatttatgcagagttctggctatctc

SEQ ID NO: 23328 - DNA, 50 bp, synthetic construct
  source 1..50: mol_type = other DNA
gcaccctatttagcttaaaataaaccttaaaatcttggcatctcccacta

SEQ ID NO: 23329 - DNA, 50 bp, synthetic construct
  source 1..50: mol_type = other DNA
tcttgtttgacttagggaaaatcattataatccctctacaccacatatct

SEQ ID NO: 23330 - DNA, 50 bp, synthetic construct
  source 1..50: mol_type = other DNA
gaatcatccgcctccttttctttcgttatacgctacagcaatcattgccg

SEQ ID NO: 23331 - DNA, 50 bp, synthetic construct
  source 1..50: mol_type = other DNA
ctgaaggatcgtgtaaaaaaaacacaactaggcacatcctaacccttggg

SEQ ID NO: 23332 - DNA, 50 bp, synthetic construct
  source 1..50: mol_type = other DNA
acgccagtatcgtacccccaatatggaccagagcaaagctagggtcatca

SEQ ID NO: 23333 - DNA, 50 bp, synthetic construct
  source 1..50: mol_type = other DNA
cgttgtgacaatcatactcattgttcttaaggttaagaggtccgtatgcg

SEQ ID NO: 23334 - DNA, 50 bp, synthetic construct
  source 1..50: mol_type = other DNA
taattaaggtattaaatgtggttgaaggatttgaattttaacccaattag

SEQ ID NO: 23335 - DNA, 50 bp, synthetic construct
  source 1..50: mol_type = other DNA
attggtaacatccggattttcgtcggtggttatttctttcgcaagttcga

SEQ ID NO: 23336 - DNA, 50 bp, synthetic construct
  source 1..50: mol_type = other DNA
tttctccctgtcgagaagaccttgccttttttggaaattatcacttatta

SEQ ID NO: 23337 - DNA, 50 bp, synthetic construct
  source 1..50: mol_type = other DNA
aattcaagttaaaatttgaacgatttttttgttgttttagtttttcattc

SEQ ID NO: 23338 - DNA, 50 bp, synthetic construct
  source 1..50: mol_type = other DNA
tctaaaaatccatctccacttttcggattgctcgaaccactatcgaccaa

SEQ ID NO: 23339 - DNA, 50 bp, synthetic construct
  source 1..50: mol_type = other DNA
ttcttggggcggacaaatggtttttgtagtggagatcgtaatgttcataa

SEQ ID NO: 23340 - DNA, 50 bp, synthetic construct
  source 1..50: mol_type = other DNA
agacaattgggttgtggccttacggatttcctttctaggtttttctattt

SEQ ID NO: 23341 - DNA, 50 bp, synthetic construct
  source 1..50: mol_type = other DNA
attggtaacaatcaattagtctgatatccgttattagtgtgatatttatt

SEQ ID NO: 23342 - DNA, 50 bp, synthetic construct
  source 1..50: mol_type = other DNA
aaatccttttccttttttggaatttatcacttatttgttgatgttagtga

SEQ ID NO: 23343 - DNA, 50 bp, synthetic construct
  source 1..50: mol_type = other DNA
ttcgaatggtagtcttgttgtttagttttacatttgaattttatatcggt

SEQ ID NO: 23344 - DNA, 50 bp, synthetic construct
  source 1..50: mol_type = other DNA
ggattgagcaatcgggttgtgtccgcacgaaattcctttctaattttttt

SEQ ID NO: 23345 - DNA, 50 bp, synthetic construct
  source 1..50: mol_type = other DNA
gttgggcctattggtaacagttaatagcttagtatccatgattgggttgt

SEQ ID NO: 23346 - DNA, 50 bp, synthetic construct
  source 1..50: mol_type = other DNA
ctaggtatctactttatgacaattatactcattgttcttggttaagagga

SEQ ID NO: 23347 - DNA, 50 bp, synthetic construct
  source 1..50: mol_type = other DNA
atgaatgtgtgtgattaaggtgtttggagttatttaaggatatagtgttt

SEQ ID NO: 23348 - DNA, 50 bp, synthetic construct
  source 1..50: mol_type = other DNA
gcgcgcagcgccgcaccctttacaccgcatgccttctgggtgaggggccg

SEQ ID NO: 23349 - DNA, 50 bp, synthetic construct
  source 1..50: mol_type = other DNA
tcggcggcaccgcgttacttccacttcccggggcgggcccccgggctcca

SEQ ID NO: 23350 - DNA, 50 bp, synthetic construct
  source 1..50: mol_type = other DNA
cccccgggcctgtgagccccccggccgccgccgccgctgagacctgcgct

SEQ ID NO: 23351 - DNA, 50 bp, synthetic construct
  source 1..50: mol_type = other DNA
ccccgccgcccaggttggggcgcccccaaggcctcgccctccttggtcgc

SEQ ID NO: 23352 - DNA, 50 bp, synthetic construct
  source 1..50: mol_type = other DNA
gagagaaggggggaggaagaagggcagccccccgcccagcccccagccgc

SEQ ID NO: 23353 - DNA, 50 bp, synthetic construct
  source 1..50: mol_type = other DNA
aaaggcgggcccgggcgggaggggagaaggggcgccccggggcagcaggg

SEQ ID NO: 23354 - DNA, 50 bp, synthetic construct
  source 1..50: mol_type = other DNA
acaagggggcggcccaggcggggggcccggcgccaaaaggcgcgccgcgg

SEQ ID NO: 23355 - DNA, 50 bp, synthetic construct
  source 1..50: mol_type = other DNA
agggctccacgcaccgcccccgcccgcccgcacagggcgcgcacaccccc

SEQ ID NO: 23356 - DNA, 50 bp, synthetic construct
  source 1..50: mol_type = other DNA
agcccagaagggcctcagcccaacgaacccttacgtcgggtttcgcccac

SEQ ID NO: 23357 - DNA, 50 bp, synthetic construct
  source 1..50: mol_type = other DNA
ctcgggccgcccacggccgcgcccaggggaggggcgccccggagcgaggt

SEQ ID NO: 23358 - DNA, 50 bp, synthetic construct
  source 1..50: mol_type = other DNA
gggccgcgggccggggcaggagcgcagccccagccccgtgcggccggagc

SEQ ID NO: 23359 - DNA, 50 bp, synthetic construct
  source 1..50: mol_type = other DNA
gcggttcgcaggcagggcgcgcacgcccgcccgcgctgggcgaggcccct

SEQ ID NO: 23360 - DNA, 50 bp, synthetic construct
  source 1..50: mol_type = other DNA
ctttcccccggcgggagagcgggcagtgcaacttgcgtgcaagcacacct

SEQ ID NO: 23361 - DNA, 50 bp, synthetic construct
  source 1..50: mol_type = other DNA
gcggcccgcagccctggccccaggccacgcctctcggcaagcagaaccct

SEQ ID NO: 23362 - DNA, 50 bp, synthetic construct
  source 1..50: mol_type = other DNA
caggggcaggcaggggcgagccgccccaggggcgcagcaggggcgccgcc

SEQ ID NO: 23363 - DNA, 50 bp, synthetic construct
  source 1..50: mol_type = other DNA
ggggccggccgctggccggcggcggcccgcgtgaaggtggcaccgccacg

SEQ ID NO: 23364 - DNA, 50 bp, synthetic construct
  source 1..50: mol_type = other DNA
gcgctggcgagagggtggggggaggcagcggagagagccccgggccaccc

SEQ ID NO: 23365 - DNA, 50 bp, synthetic construct
  source 1..50: mol_type = other DNA
agggagaggggggcaggcggagggcccgcccgcacccccacccccggccc

SEQ ID NO: 23366 - DNA, 50 bp, synthetic construct
  source 1..50: mol_type = other DNA
tcgggaggccggcgcgaaagcggcttagggccccggctccttcggtctat

SEQ ID NO: 23367 - DNA, 50 bp, synthetic construct
  source 1..50: mol_type = other DNA
ggcagccagtgcgcagagggctgcttcggctcgcgtgccccagccgccgc

SEQ ID NO: 23368 - DNA, 50 bp, synthetic construct
  source 1..50: mol_type = other DNA
gagggaagaaggggcaggcgccccccctgccccgcccacgcccccccgcg

SEQ ID NO: 23369 - DNA, 50 bp, synthetic construct
  source 1..50: mol_type = other DNA
ggagcaggagggggaagggggaggcgccccagcccccaagggccccaagc

SEQ ID NO: 23370 - DNA, 50 bp, synthetic construct
  source 1..50: mol_type = other DNA
ggggcaggcaggggcaggccgcccaggggcggagcagcgggggggcccac

SEQ ID NO: 23371 - DNA, 50 bp, synthetic construct
  source 1..50: mol_type = other DNA
ttaggcgggttcgccttgctatgccgtcgcggcttcctcggagccaaccg

SEQ ID NO: 23372 - DNA, 50 bp, synthetic construct
  source 1..50: mol_type = other DNA
gggtggggggcagcggaggcagcagggagagcccccaggcccccgggccc

SEQ ID NO: 23373 - DNA, 50 bp, synthetic construct
  source 1..50: mol_type = other DNA
caccccaccgcctttccccccgccagcgcccccggcccggcggggagggt

SEQ ID NO: 23374 - DNA, 50 bp, synthetic construct
  source 1..50: mol_type = other DNA
ccggctccctcggcctatgggcagcggcgcgagaggggggccggagaggg

SEQ ID NO: 23375 - DNA, 50 bp, synthetic construct
  source 1..50: mol_type = other DNA
acccgcggcctggtggggcggggctcacaatgtcggggggccgtcgtcgc

SEQ ID NO: 23376 - DNA, 50 bp, synthetic construct
  source 1..50: mol_type = other DNA
gggaagagccccaccccccctcgcttcggctcgcgtgccccagccgccgc

SEQ ID NO: 23377 - DNA, 50 bp, synthetic construct
  source 1..50: mol_type = other DNA
tctccgtcacctcctggcttgggtgtaggcaacttttcccacccctactc

SEQ ID NO: 23378 - DNA, 50 bp, synthetic construct
  source 1..50: mol_type = other DNA
gatagtcgtcccttcttttttactgccatggactgattcttcggggccga

SEQ ID NO: 23379 - DNA, 50 bp, synthetic construct
  source 1..50: mol_type = other DNA
ctatgatgggaacacactaccgatgagattgggccatccaactagtagat

SEQ ID NO: 23380 - DNA, 50 bp, synthetic construct
  source 1..50: mol_type = other DNA
gatggaagtcctcactgcacctctgcctcgtcactgttacggcggtagac

SEQ ID NO: 23381 - DNA, 50 bp, synthetic construct
  source 1..50: mol_type = other DNA
agccagtagtccatcataaatcggaacccaccaccaggtgggacgaaggg

SEQ ID NO: 23382 - DNA, 50 bp, synthetic construct
  source 1..50: mol_type = other DNA
acctttttggcacgccgttacccttctgcactacgcctcacttcaaatca

SEQ ID NO: 23383 - DNA, 50 bp, synthetic construct
  source 1..50: mol_type = other DNA
gttgccactttgagtttccttaactgcccccgggcgtgttcgcctccttg

SEQ ID NO: 23384 - DNA, 50 bp, synthetic construct
  source 1..50: mol_type = other DNA
cgcctccctgcgtcactccatcgagttggggtcgctaccaacagaccccg

SEQ ID NO: 23385 - DNA, 50 bp, synthetic construct
  source 1..50: mol_type = other DNA
aggattccatcgctttaaggaacagcccattcaaggctgggcgtgctttc

SEQ ID NO: 23386 - DNA, 50 bp, synthetic construct
  source 1..50: mol_type = other DNA
ttgtgtccaaacacgatttagctttctactgcatatgctcgactgcggac

SEQ ID NO: 23387 - DNA, 50 bp, synthetic construct; identical to SEQ ID NO: 23239
  source 1..50: mol_type = other DNA

SEQ ID NO: 23388 - DNA, 50 bp, synthetic construct
  source 1..50: mol_type = other DNA
catggactgattcttcggggccgattgatgcacggtcgtcggcgccatta

SEQ ID NO: 23389 - DNA, 50 bp, synthetic construct
  source 1..50: mol_type = other DNA
ttcgcatcaccataggactcatcgcgccctgtgctctttagaacgcactt

SEQ ID NO: 23390 - DNA, 50 bp, synthetic construct
  source 1..50: mol_type = other DNA
aggcggtgtctaccattgtcgggtcataaaatttgctcttctgaaatcta

SEQ ID NO: 23391 - DNA, 50 bp, synthetic construct
  source 1..50: mol_type = other DNA
cgcctcactttctcttggactttggcatacggatgttcttcagtctcggg

SEQ ID NO: 23392 - DNA, 50 bp, synthetic construct
  source 1..50: mol_type = other DNA
cctaatccgtcaaccgccccattgccgggtggtttggctgctaggtatcg

SEQ ID NO: 23393 - DNA, 50 bp, synthetic construct
  source 1..50: mol_type = other DNA
ttggtcaactataagaccatggcgcaatactggcgggtacgacttcagta

SEQ ID NO: 23394 - DNA, 50 bp, synthetic construct
  source 1..50: mol_type = other DNA
gtagtatatgacttatgtatccatatactccccttggcggacttgacttt

SEQ ID NO: 23395 - DNA, 50 bp, synthetic construct
  source 1..50: mol_type = other DNA
ttggctccggaccccgcgattggaggcccgggcacggcagaggggaaagc

SEQ ID NO: 23396 - DNA, 50 bp, synthetic construct; identical to SEQ ID NO: 23245
  source 1..50: mol_type = other DNA

SEQ ID NO: 23397 - DNA, 50 bp, synthetic construct
  source 1..50: mol_type = other DNA
actgtggacgggccacgaccttccaattctcctctacagtagctattctc

SEQ ID NO: 23398 - DNA, 50 bp, synthetic construct
  source 1..50: mol_type = other DNA
cgcactcacttcttccaaaagcctagcatttcgagacaacagtccctgct

SEQ ID NO: 23399 - DNA, 50 bp, synthetic construct; identical to SEQ ID NO: 23220
  source 1..50: mol_type = other DNA

SEQ ID NO: 23400 - DNA, 50 bp, synthetic construct
  source 1..50: mol_type = other DNA
acagcacccgcgtcctataaactcctcgagacaggaatcatgctctcctg

SEQ ID NO: 23401 - DNA, 50 bp, synthetic construct
  source 1..50: mol_type = other DNA
ctcactctcgagacttaacttcggggccatttgccgccggcattgatatt

SEQ ID NO: 23402 - DNA, 50 bp, synthetic construct
  source 1..50: mol_type = other DNA
cgacaactttatgccgggaaactaataaactcaagattgagcatctttgc

SEQ ID NO: 23403 - DNA, 50 bp, synthetic construct
  source 1..50: mol_type = other DNA
gaagcactcgctccaccgcccaggcgggcatgggatttggctgtgaccac

SEQ ID NO: 23404 - DNA, 50 bp, synthetic construct
  source 1..50: mol_type = other DNA
gtcctataaactctcctcgacagggatcatgctctcctggccctacctgc

SEQ ID NO: 23405 - DNA, 50 bp, synthetic construct
  source 1..50: mol_type = other DNA
ctttagatacatgtcctatccgccctctgaacctttgtactcgcagtcga

SEQ ID NO: 23406 - DNA, 50 bp, synthetic construct
  source 1..50: mol_type = other DNA
acgaatctgttggtcctacaaccgaatcttcgtcggtgagtaattttctc

SEQ ID NO: 23407 - DNA, 50 bp, synthetic construct
  source 1..50: mol_type = other DNA
ctcccttcaatcatggcttcagaccctaccttctaccgctcttttcgaca

SEQ ID NO: 23408 - DNA, 50 bp, synthetic construct
  source 1..50: mol_type = other DNA
cggcgtctcttatccgagttcgttgacaaatcgtttttgtgtccagatac

SEQ ID NO: 23409 - DNA, 50 bp, synthetic construct
  source 1..50: mol_type = other DNA
ggcggttccgatttatatttgctcactcgctatcacttggtcatggcact

SEQ ID NO: 23410 - DNA, 50 bp, synthetic construct; identical to SEQ ID NO: 23191
  source 1..50: mol_type = other DNA

SEQ ID NO: 23411 - DNA, 50 bp, synthetic construct
  source 1..50: mol_type = other DNA
ggccaatgggcgctgttctgcctttctggggtacctcgaaatgacatcgg

SEQ ID NO: 23412 - DNA, 50 bp, synthetic construct; identical to SEQ ID NO: 23187
  source 1..50: mol_type = other DNA

SEQ ID NO: 23413 - DNA, 50 bp, synthetic construct; identical to SEQ ID NO: 23267
  source 1..50: mol_type = other DNA

SEQ ID NO: 23414 - DNA, 50 bp, synthetic construct; identical to SEQ ID NO: 23145
  source 1..50: mol_type = other DNA

SEQ ID NO: 23415 - DNA, 50 bp, synthetic construct
  source 1..50: mol_type = other DNA
ttggctgtgtccatccatccttcttctaagattccggttgccctcttccc

SEQ ID NO: 23416 - DNA, 50 bp, synthetic construct
  source 1..50: mol_type = other DNA
aggggctttatcgaaatcccgatcgcagcctttcttggaatcacttccat

SEQ ID NO: 23417 - DNA, 50 bp, synthetic construct
  source 1..50: mol_type = other DNA
cactaggtctcatggtgccctgtgcactttgggacacccttcgtcccccc

SEQ ID NO: 23418 - DNA, 50 bp, synthetic construct
  source 1..50: mol_type = other DNA
tgacgaaaattctgaattagacaattggcttgccgtacccttccggccag

SEQ ID NO: 23419 - DNA, 50 bp, synthetic construct
  source 1..50: mol_type = other DNA
acccccccccgcccccccctatccctcccccccccccccccagtttcctt

SEQ ID NO: 23420 - DNA, 50 bp, synthetic construct; identical to SEQ ID NO: 23171
  source 1..50: mol_type = other DNA

SEQ ID NO: 23421 - DNA, 50 bp, synthetic construct
  source 1..50: mol_type = other DNA
gcccctctcacggaccgcccatcaaattgaccccgccaacggagggtttc

SEQ ID NO: 23422 - DNA, 50 bp, synthetic construct
  source 1..50: mol_type = other DNA
ccccagagaaactccagaacacaccaccactcacacacttggctagtaca

SEQ ID NO: 23423 - DNA, 50 bp, synthetic construct
  source 1..50: mol_type = other DNA
gacgcttcagcgttctgcttcatatcccccactgtggacgggccacgacc

SEQ ID NO: 23424 - DNA, 50 bp, synthetic construct; identical to SEQ ID NO: 23242
  source 1..50: mol_type = other DNA

SEQ ID NO: 23425 - DNA, 50 bp, synthetic construct; identical to SEQ ID NO: 23231
  source 1..50: mol_type = other DNA

SEQ ID NO: 23426 - DNA, 50 bp, synthetic construct
  source 1..50: mol_type = other DNA
gggcattgaatccctattccccacgagtacctttgtactcggcgtctctt

SEQ ID NO: 23427 - DNA, 50 bp, synthetic construct
  source 1..50: mol_type = other DNA
gcacgctaaccttcacgtgcagattcgtcactccacactatactcagttt

SEQ ID NO: 23428 - DNA, 50 bp, synthetic construct
  source 1..50: mol_type = other DNA
ttgctctaaggcattcatcaccgctcgcttgcgccttctcccgtttggcc

SEQ ID NO: 23429 - DNA, 50 bp, synthetic construct
  source 1..50: mol_type = other DNA
acattaccgtattcccgcgaactgaccctctgactgttcagctagtccat

SEQ ID NO: 23430 - DNA, 50 bp, synthetic construct
  source 1..50: mol_type = other DNA
tgggacgcggcttttaaattgccccgatttagtatgtggcttcgaaccct

SEQ ID NO: 23431 - DNA, 50 bp, synthetic construct
  source 1..50: mol_type = other DNA
catgtcggagcttggtactggtgccgaacatctcgtgacttttctgatcc

SEQ ID NO: 23432 - DNA, 50 bp, synthetic construct
  source 1..50: mol_type = other DNA
ctctggctatcgcatgctcatgacacttcctttccacttttcgtggggct

SEQ ID NO: 23433 - DNA, 50 bp, synthetic construct
  source 1..50: mol_type = other DNA
agtctgacgtgctctattcaacccgtcagctttccctttctcgggtctgg

SEQ ID NO: 23434 - DNA, 50 bp, synthetic construct
  source 1..50: mol_type = other DNA
tcctcgtaagaattgcgcttcttcgtcatggccttcctcgacacctcacg

SEQ ID NO: 23435 - DNA, 50 bp, synthetic construct
  source 1..50: mol_type = other DNA
agtggcggatagctcaggactgcttgaggcttacgagtgccaagcgtcag

SEQ ID NO: 23436 - DNA, 50 bp, synthetic construct
  source 1..50: mol_type = other DNA
tcctcacgggtccttacccggcgtctcttatctgggttcgctgacaaatg

SEQ ID NO: 23437 - DNA, 50 bp, synthetic construct
  source 1..50: mol_type = other DNA
gttccaccgaactgacgctctgtctgtgcagctcgtccgtgctttcaccc

SEQ ID NO: 23438 - DNA, 50 bp, synthetic construct
  source 1..50: mol_type = other DNA
aacacgtatgaccgttccaattccctatttcagggcctcggcgtcccttt

SEQ ID NO: 23439 - DNA, 50 bp, synthetic construct
  source 1..50: mol_type = other DNA
cgacgacttaagtgcgaccgctcttttcgacgatgcttcgcttccgcggg

SEQ ID NO: 23440 - DNA, 50 bp, synthetic construct
  source 1..50: mol_type = other DNA
ctccttccaagcaggcgagtcccaatcagccctcgattccagtccgcctt

SEQ ID NO: 23441 - DNA, 50 bp, synthetic construct
  source 1..50: mol_type = other DNA
aaccaccccattgccggatggttcggctgctagtcatcggctggactctc

SEQ ID NO: 23442 - DNA, 50 bp, synthetic construct
  source 1..50: mol_type = other DNA
gcatacctccccttgggccacttgactttgtagattcatcggcctccttc

SEQ ID NO: 23443 - DNA, 50 bp, synthetic construct
  source 1..50: mol_type = other DNA
acattaccgtattcccgcgaactgaccctctgattgttcagctagtccat

SEQ ID NO: 23444 - DNA, 50 bp, synthetic construct
  source 1..50: mol_type = other DNA
gtaggacaagtccctgtcacggaccgcccatcaaattgaccccgccaacg

SEQ ID NO: 23445 - DNA, 50 bp, synthetic construct
  source 1..50: mol_type = other DNA
tttaggctagcttcggattaccctaggactcatgccgctctgtgctcctt

SEQ ID NO: 23446 - DNA, 50 bp, synthetic construct
  source 1..50: mol_type = other DNA
ccacgtaatcgatcaaccaccccatttccggatggttccgctgctaggca

SEQ ID NO: 23447 - DNA, 50 bp, synthetic construct
  source 1..50: mol_type = other DNA
ctcttttcggggccgcagtccgcgcaacggcgggcatggggtttggctgt

SEQ ID NO: 23448 - DNA, 50 bp, synthetic construct
  source 1..50: mol_type = other DNA
gttttacattgcctccgcgggtttccaagggagtcgcgcttgcctttggc

SEQ ID NO: 23449 - DNA, 50 bp, synthetic construct
  source 1..50: mol_type = other DNA
tacactctcgtaacttaacttcggggtcatttgccgccggcattgatatt

SEQ ID NO: 23450 - DNA, 50 bp, synthetic construct
  source 1..50: mol_type = other DNA
actgcagtctagtagtacggggaatgcaggtcccgaagtgcgtacgatgt

SEQ ID NO: 23451 - DNA, 50 bp, synthetic construct
  source 1..50: mol_type = other DNA
tagacgctttcgctctcgactgcatatccacgactgtggacgggccacga

SEQ ID NO: 23452 - DNA, 50 bp, synthetic construct
  source 1..50: mol_type = other DNA
ctaacaccctttctaagatagccgcaccctaccccagcgcaggatagtcg

SEQ ID NO: 23453 - DNA, 50 bp, synthetic construct
  source 1..50: mol_type = other DNA
tccctttccacttttcgtggggccctcccctcactttatcttggactttg

SEQ ID NO: 23454 - DNA, 50 bp, synthetic construct
  source 1..50: mol_type = other DNA
cctcgcatcggcaccatccactcgcgtccccactgtgccttaccctcggc

SEQ ID NO: 23455 - DNA, 50 bp, synthetic construct; identical to SEQ ID NO: 23257
  source 1..50: mol_type = other DNA

SEQ ID NO: 23456 - DNA, 50 bp, synthetic construct; identical to SEQ ID NO: 23208
  source 1..50: mol_type = other DNA

SEQ ID NO: 23457 - DNA, 50 bp, synthetic construct
  source 1..50: mol_type = other DNA
ctccggacgggtatcatgctctcctggacccacctgcttggagaccatac

SEQ ID NO: 23458 - DNA, 50 bp, synthetic construct
  source 1..50: mol_type = other DNA
tcgacgtaccgagtcacactttttgaggccaccatattctacctgggcgc

SEQ ID NO: 23459 - DNA, 50 bp, synthetic construct
  source 1..50: mol_type = other DNA
ggccggcgcgcgctatgggcagcccccaacgcaccggccccaacgccctc

SEQ ID NO: 23460 - DNA, 50 bp, synthetic construct
  source 1..50: mol_type = other DNA
tggggcattgaagccctcttccccacgaggtctctacctcggcgtctctt

SEQ ID NO: 23461 - DNA, 50 bp, synthetic construct
  source 1..50: mol_type = other DNA
ggggtacgaggccttatcgaggacctttgcccaccattacggcctacaag

SEQ ID NO: 23462 - DNA, 50 bp, synthetic construct
  source 1..50: mol_type = other DNA
gctcatttctacgagcaattcgcgtcttcctgcttttctggggccctgga

SEQ ID NO: 23463 - DNA, 50 bp, synthetic construct
  source 1..50: mol_type = other DNA
gctctccaggacgcggcttttacaggccccgattttgtacggtggcttcg

SEQ ID NO: 23464 - DNA, 50 bp, synthetic construct
  source 1..50: mol_type = other DNA
agtaacttagacccgtgcactacacatcctatccagcctccgaaacttcg

SEQ ID NO: 23465 - DNA, 50 bp, synthetic construct
  source 1..50: mol_type = other DNA
gtttaggcgacacgtactctgcttcggcactacacctcgctttatttcat

SEQ ID NO: 23466 - DNA, 50 bp, synthetic construct
  source 1..50: mol_type = other DNA
tcatggacacttctacgtccaatgggcgctgtcctgcctttctggggtac

SEQ ID NO: 23467 - DNA, 50 bp, synthetic construct
  source 1..50: mol_type = other DNA
ccattgccgggtggttccgttgctagtcatccccaagactctccttccag

SEQ ID NO: 23468 - DNA, 50 bp, synthetic construct
  source 1..50: mol_type = other DNA
ggtatgcggttaggtattgcatacctccccttgggccccttgactttgta

SEQ ID NO: 23469 - DNA, 50 bp, synthetic construct
  source 1..50: mol_type = other DNA
cttatgagcgacaaacgctatatgtcattcgccggttcgctttcgcaatt

SEQ ID NO: 23470 - DNA, 50 bp, synthetic construct
  source 1..50: mol_type = other DNA
gcgtccccactgtgccttaccctcggccggcgcctccaccaaaaggcacc

SEQ ID NO: 23471 - DNA, 50 bp, synthetic construct
  source 1..50: mol_type = other DNA
gcaattacccactctcgcacggaaaacatcttacttggccgctcaatgct

SEQ ID NO: 23472 - DNA, 50 bp, synthetic construct
  source 1..50: mol_type = other DNA
aggtatagccgcccctccaaaccgtggagctacagccgagcagcgtagga

SEQ ID NO: 23473 - DNA, 50 bp, synthetic construct
  source 1..50: mol_type = other DNA
caaaggcataccttccctgtagcgagtttcctattttccatgaggcccct

SEQ ID NO: 23474 - DNA, 50 bp, synthetic construct
  source 1..50: mol_type = other DNA
ccgcaaccaactgggcccgcattccctggctttaatttcatcccttcggc

SEQ ID NO: 23475 - DNA, 50 bp, synthetic construct
  source 1..50: mol_type = other DNA
tgattgcttcagactgacgattctgtcgatcctacaaccgaaccttcgtc

SEQ ID NO: 23476 - DNA, 50 bp, synthetic construct
  source 1..50: mol_type = other DNA
ggcactcctcgcgaccttgcgtatcttcactcttacggccatactcatcg

SEQ ID NO: 23477 - DNA, 50 bp, synthetic construct
  source 1..50: mol_type = other DNA
gctcccaggcccgtacctattattagcccatattccgtctgtggcttccg

SEQ ID NO: 23478 - DNA, 50 bp, synthetic construct
  source 1..50: mol_type = other DNA
tgacgtaaattctaagacgttacaatcaccttgccaaaaccctttcggcc

SEQ ID NO: 23479 - DNA, 50 bp, synthetic construct
  source 1..50: mol_type = other DNA
ttttcgaatacacatatgattccacgggcatggcgtttggctgtgtccat

SEQ ID NO: 23480 - DNA, 50 bp, synthetic construct
  source 1..50: mol_type = other DNA
gtcggtcctccaaccgagtcttcgtcggtgggaactttctcacgcattgt

SEQ ID NO: 23481 - DNA, 50 bp, synthetic construct
  source 1..50: mol_type = other DNA
atcgctcttgttccactcttaggaacaccggcttataggttccagaggtc

SEQ ID NO: 23482 - DNA, 50 bp, synthetic construct
  source 1..50: mol_type = other DNA
tatcgagcatgaggggctttacgtaaatccacgtcggaacgcccaatgac

SEQ ID NO: 23483 - DNA, 50 bp, synthetic construct
  source 1..50: mol_type = other DNA
actcatcgctctatctccactcttaggagatccggcttataggttccaaa

SEQ ID NO: 23484 - DNA, 50 bp, synthetic construct
  source 1..50: mol_type = other DNA
tgccagcgttccgattttgagtttctttaactgcccccgggcgtgttcgc

SEQ ID NO: 23485 - DNA, 50 bp, synthetic construct
  source 1..50: mol_type = other DNA
tatgggcagcccccaacgcaacggccacaacaccctagtgcacagggcca

SEQ ID NO: 23486 - DNA, 50 bp, synthetic construct
  source 1..50: mol_type = other DNA
ccctggctttaatctcatcccttcgtgtgaaccgacttccgctcttttcg

SEQ ID NO: 23487 - DNA, 50 bp, synthetic construct
  source 1..50: mol_type = other DNA
ccttcactttgtagagtcatggacgtccttccctatgaggcactcatcac

SEQ ID NO: 23488 - DNA, 50 bp, synthetic construct
  source 1..50: mol_type = other DNA
gggcaactttaccatcgcctacttgacacccatcgcctctttaaggttag

SEQ ID NO: 23489 - DNA, 50 bp, synthetic construct
  source 1..50: mol_type = other DNA
acgcgcacgtggtacctaccacagagggctcatcgcgccctgagcacctt

SEQ ID NO: 23490 - DNA, 50 bp, synthetic construct
  source 1..50: mol_type = other DNA
ttaacatcatagccacttctacggctaatgggcgctaccctgcttttctg

SEQ ID NO: 23491 - DNA, 50 bp, synthetic construct
  source 1..50: mol_type = other DNA
ttcgaatggtttcttatagtttgaggcttacggtagctctactacatgcc

SEQ ID NO: 23492 - DNA, 50 bp, synthetic construct
  source 1..50: mol_type = other DNA
gcgaccacgtggccaatctgacggttcagatatcggcccatcggttcggg

SEQ ID NO: 23493 - DNA, 50 bp, synthetic construct
  source 1..50: mol_type = other DNA
cgtcttcgctcggattgacgctctgactgcccagctcgtcattgctttca

SEQ ID NO: 23494 - DNA, 50 bp, synthetic construct
  source 1..50: mol_type = other DNA
aggtcattacctaacccatcccctcgcaacatatgcgcctctttgtcatc

SEQ ID NO: 23495 - DNA, 50 bp, synthetic construct
  source 1..50: mol_type = other DNA
gagccgttttaccggggcattgaagccctcttccccgcgactgatattca

SEQ ID NO: 23496 - DNA, 50 bp, synthetic construct
  source 1..50: mol_type = other DNA
acttgattgcttcagtctaacgattctgtcgatcctacaaccgaaccttc

SEQ ID NO: 23497 - DNA, 50 bp, synthetic construct
  source 1..50: mol_type = other DNA
tacatgtcctatccaccctccgactcttagccattgcggtcaacggctcc

SEQ ID NO: 23498 - DNA, 50 bp, synthetic construct
  source 1..50: mol_type = other DNA
gtttaggcgtaccgtacgtaccgctccacactactaccctcggcaatacc

SEQ ID NO: 23499 - DNA, 50 bp, synthetic construct
  source 1..50: mol_type = other DNA
tgccaggattccatcgctttaaggaacagcccattcaaggctggacgtgc

SEQ ID NO: 23500 - DNA, 50 bp, synthetic construct
  source 1..50: mol_type = other DNA
attttgcgtgacctcctggcttggtcctgtgcaacttttcacaaacctac

SEQ ID NO: 23501 - DNA, 50 bp, synthetic construct
  source 1..50: mol_type = other DNA
aaggttagcttgggcctatatcgaccaagaggggctttatcgaaatcccg

SEQ ID NO: 23502 - DNA, 50 bp, synthetic construct
  source 1..50: mol_type = other DNA
tctacgggtaatgggcgctgacctgcctctctggggcatctcgaaatgac

SEQ ID NO: 23503 - DNA, 50 bp, synthetic construct
  source 1..50: mol_type = other DNA
actgaccccgccagcggaggatttcgcattgcctccgcgggtttccaagg

SEQ ID NO: 23504 - DNA, 50 bp, synthetic construct; identical to SEQ ID NO: 23197
  source 1..50: mol_type = other DNA

SEQ ID NO: 23505 - DNA, 50 bp, synthetic construct
  source 1..50: mol_type = other DNA
ttgtgtccagagacggtttagctttctacttcatatccccgactgtggac

SEQ ID NO: 23506 - DNA, 50 bp, synthetic construct
  source 1..50: mol_type = other DNA
cctgacgctatttcgtcggttcccttatcttcttctgagacccttctcag

SEQ ID NO: 23507 - DNA, 50 bp, synthetic construct
  source 1..50: mol_type = other DNA
ccactatcaggacatcgacttctactaccacacacccaacaacccaacgg

SEQ ID NO: 23508 - DNA, 50 bp, synthetic construct
  source 1..50: mol_type = other DNA
gatacgctttacctttgtactccatatatcggactgtggacgggccacga

SEQ ID NO: 23509 - DNA, 50 bp, synthetic construct
  source 1..50: mol_type = other DNA
actccttccgtccgtttaggtggaaggctcgacttgaattatcatacgtt

SEQ ID NO: 23510 - DNA, 50 bp, synthetic construct
  source 1..50: mol_type = other DNA
cttaactggaccaggttcccacatcccacaggccaaccgtttaggcggcc

SEQ ID NO: 23511 - DNA, 50 bp, synthetic construct; identical to SEQ ID NO: 23210
  source 1..50: mol_type = other DNA

SEQ ID NO: 23512 - DNA, 50 bp, synthetic construct
  source 1..50: mol_type = other DNA
gtactaatgaccacgacgcgtttacctgcctcgctatgaccaacatagtc

SEQ ID NO: 23513 - DNA, 50 bp, synthetic construct
  source 1..50: mol_type = other DNA
agagcttctgttgatcctacaaccgagtcttcgtcggtatgtaagtttct

SEQ ID NO: 23514 - DNA, 50 bp, synthetic construct
  source 1..50: mol_type = other DNA
tctcccattgtcagggcatcagctttactcatgttctcccgctcttaggt

SEQ ID NO: 23515 - DNA, 50 bp, synthetic construct
  source 1..50: mol_type = other DNA
tcagtcaacactttcaaacgccgagttggcattttaacgtcaactatgac

SEQ ID NO: 23516 - DNA, 50 bp, synthetic construct
  source 1..50: mol_type = other DNA
tggggcattgaagccctcttccccacgaatgcttccattcggcgtctctt

SEQ ID NO: 23517 - DNA, 50 bp, synthetic construct; identical to SEQ ID NO: 23216
  source 1..50: mol_type = other DNA

SEQ ID NO: 23518 - DNA, 50 bp, synthetic construct; identical to SEQ ID NO: 23408
  source 1..50: mol_type = other DNA

SEQ ID NO: 23519 - DNA, 50 bp, synthetic construct
  source 1..50: mol_type = other DNA
ctctatcgagcatgaggggctttacgtaaatccacgtcggagctgaatat

SEQ ID NO: 23520 - DNA, 50 bp, synthetic construct; identical to SEQ ID NO: 23260
  source 1..50: mol_type = other DNA

SEQ ID NO: 23521 - DNA, 50 bp, synthetic construct; identical to SEQ ID NO: 23244
  source 1..50: mol_type = other DNA

SEQ ID NO: 23522 - DNA, 50 bp, synthetic construct; identical to SEQ ID NO: 23209
  source 1..50: mol_type = other DNA

SEQ ID NO: 23523 - DNA, 50 bp, synthetic construct; identical to SEQ ID NO: 23253
  source 1..50: mol_type = other DNA

SEQ ID NO: 23524 - DNA, 50 bp, synthetic construct
  source 1..50: mol_type = other DNA
cgcgcggattgtgtacgttcagcttgccttgaactctctcgaacgaaaaa

SEQ ID NO: 23525 - DNA, 50 bp, synthetic construct
  source 1..50: mol_type = other DNA
ctatcggccggactcctcccagggggtgtacccgtgactctgtgcccggg

SEQ ID NO: 23526 - DNA, 50 bp, synthetic construct; identical to SEQ ID NO: 23159
  source 1..50: mol_type = other DNA

SEQ ID NO: 23527 - DNA, 50 bp, synthetic construct
  source 1..50: mol_type = other DNA
cagccctggattccactccgacttttcgcatcggctacctgttgtccaac

SEQ ID NO: 23528 - DNA, 50 bp, synthetic construct
  source 1..50: mol_type = other DNA
ttggttagacgggcgcggggcggaggcgaaagcccaccaccaccacacac

SEQ ID NO: 23529 - DNA, 50 bp, synthetic construct
  source 1..50: mol_type = other DNA
accgagtcctacttgcgaccgccgcacgaattgtgtacgttcagcttgcc

SEQ ID NO: 23530 - DNA, 50 bp, synthetic construct
  source 1..50: mol_type = other DNA
tttgccgaacggtccccttgtccgaacttccggaccggcatctcccacgg

SEQ ID NO: 23531 - DNA, 50 bp, synthetic construct
  source 1..50: mol_type = other DNA
ctttaaggcattggaggcttctaaatttgtgtccctgcgaaaacttcccg

SEQ ID NO: 23532 - DNA, 50 bp, synthetic construct; identical to SEQ ID NO: 23215
  source 1..50: mol_type = other DNA

SEQ ID NO: 23533 - DNA, 50 bp, synthetic construct
  source 1..50: mol_type = other DNA
actggctatcgcgtatcatgacacttccttgccacttttcttggggccct

SEQ ID NO: 23534 - DNA, 50 bp, synthetic construct
  source 1..50: mol_type = other DNA
gttccactttatggcgagacaagagcaaactacagattggagcttgtcag

SEQ ID NO: 23535 - DNA, 50 bp, synthetic construct; identical to SEQ ID NO: 23219
  source 1..50: mol_type = other DNA

SEQ ID NO: 23536 - DNA, 50 bp, synthetic construct
  source 1..50: mol_type = other DNA
acgtaccaacagcagtcgagcacggcactccacagccgaattcacggtat

SEQ ID NO: 23537 - DNA, 50 bp, synthetic construct
  source 1..50: mol_type = other DNA
ggtttgaggatgccctccgtcgtcactccttataaccagttacctgctct

SEQ ID NO: 23538 - DNA, 50 bp, synthetic construct
  source 1..50: mol_type = other DNA
atgagggctctctggctatcgcttggtcatggcactccctttccactttt

SEQ ID NO: 23539 - DNA, 50 bp, synthetic construct
  source 1..50: mol_type = other DNA
gaagcccctcctcgtttataggtaactaggcctctagagacttacccctt

SEQ ID NO: 23540 - DNA, 50 bp, synthetic construct
  source 1..50: mol_type = other DNA
aattcaccttttgctacacttctatgcgtctgttggtcctacaaccgagt

SEQ ID NO: 23541 - DNA, 50 bp, synthetic construct
  source 1..50: mol_type = other DNA
gacttaaaggatcccccgcagtttcggatggcttcttatagtttgaggct

SEQ ID NO: 23542 - DNA, 50 bp, synthetic construct; identical to SEQ ID NO: 23202
  source 1..50: mol_type = other DNA

SEQ ID NO: 23543 - DNA, 50 bp, synthetic construct; identical to SEQ ID NO: 23163
  source 1..50: mol_type = other DNA

SEQ ID NO: 23544 - DNA, 50 bp, synthetic construct
  source 1..50: mol_type = other DNA
gtcaacagtacggttaccgtgccgacccgtcgatacatgccttgcctatt

SEQ ID NO: 23545 - DNA, 50 bp, synthetic construct
  source 1..50: mol_type = other DNA
gggcgttccgatttatgaggaatcactggctatcgcgtatcatgacactt

SEQ ID NO: 23546 - DNA, 50 bp, synthetic construct
  source 1..50: mol_type = other DNA
cgacctactggttcccaaggccccggtgcaagcagcaggggcccactcag

SEQ ID NO: 23547 - DNA, 50 bp, synthetic construct
  source 1..50: mol_type = other DNA
atgcatctgggctttggcccactagataggtacacgtccaacttcaacgg

SEQ ID NO: 23548 - DNA, 50 bp, synthetic construct
  source 1..50: mol_type = other DNA
tcaactatgacctatagaactcacgtcaactccgtccgccttaagcacca

SEQ ID NO: 23549 - DNA, 50 bp, synthetic construct
  source 1..50: mol_type = other DNA
cattgccccgattcgtacattggcttcgaaccctacgtcgttacgcacca

SEQ ID NO: 23550 - DNA, 50 bp, synthetic construct
  source 1..50: mol_type = other DNA
gactttaaatcatcccttcgtacgaacctgcctccgctcttttcgagacc

SEQ ID NO: 23551 - DNA, 50 bp, synthetic construct
  source 1..50: mol_type = other DNA
ttagtttaaggcactatcgaccaagagaggctttacgtaaatccacgtcg

SEQ ID NO: 23552 - DNA, 50 bp, synthetic construct
  source 1..50: mol_type = other DNA
ggtactcgtcccacttccactccattttgagtgacctccgggcttggtcc

SEQ ID NO: 23553 - DNA, 50 bp, synthetic construct
  source 1..50: mol_type = other DNA
gcgacctactggttcccaaggccccggtgcaagcagcaggggcccactca

SEQ ID NO: 23554 - DNA, 50 bp, synthetic construct
  source 1..50: mol_type = other DNA
aagtgcaattcacctcttcctacaccttaacgtgtctgttggtcctacaa

SEQ ID NO: 23555 - DNA, 50 bp, synthetic construct
  source 1..50: mol_type = other DNA
tatgtagattacataccatcctctcgcaagacatacccctcttcagcatc

SEQ ID NO: 23556 - DNA, 50 bp, synthetic construct
  source 1..50: mol_type = other DNA
tgcgtcactccatcgagtaggggccactaccaacaggccccgattcacac

SEQ ID NO: 23557 - DNA, 50 bp, synthetic construct
  source 1..50: mol_type = other DNA
cactctcagggcatcagctttacacaaggcggcgacaacctcccagcggg

SEQ ID NO: 23558 - DNA, 50 bp, synthetic construct
  source 1..50: mol_type = other DNA
acatcttgccaggccgctcaacgcgagtgaccgttccaattcgtggcctc

SEQ ID NO: 23559 - DNA, 50 bp, synthetic construct; identical to SEQ ID NO: 23193
  source 1..50: mol_type = other DNA

SEQ ID NO: 23560 - DNA, 50 bp, synthetic construct
  source 1..50: mol_type = other DNA
gaggaacgccaatggctgaaatccatgtgggccgagggtaccgaactgcc

SEQ ID NO: 23561 - DNA, 50 bp, synthetic construct
  source 1..50: mol_type = other DNA
acggcgaatcacctaacaaccacattcgcacatccactaccacatccatt

SEQ ID NO: 23562 - DNA, 50 bp, synthetic construct
  source 1..50: mol_type = other DNA
gtccattctggggaacttctgatgctccatctatccgacgtccacatgcg

SEQ ID NO: 23563 - DNA, 50 bp, synthetic construct
  source 1..50: mol_type = other DNA
ccaccttcggggcgctccccacctcggctggccatgattgcccgctgccg

SEQ ID NO: 23564 - DNA, 50 bp, synthetic construct; identical to SEQ ID NO: 23184
  source 1..50: mol_type = other DNA

SEQ ID NO: 23565 - DNA, 50 bp, synthetic construct
  source 1..50: mol_type = other DNA
ctcacctttacggcagcgagttgcctattttcgatgggacccctattgtc

SEQ ID NO: 23566 - DNA, 50 bp, synthetic construct
  source 1..50: mol_type = other DNA
taacggcccatagattcagccctaacctattcacgactttcgtagattca

SEQ ID NO: 23567 - DNA, 50 bp, synthetic construct
  source 1..50: mol_type = other DNA
cgactgcggacgggccacgaccttccaattctcctctccaatcgcgttcg

SEQ ID NO: 23568 - DNA, 50 bp, synthetic construct
  source 1..50: mol_type = other DNA
gaaatgacgtcaaactataactcatagacatggtgtacatgtcctatcca

SEQ ID NO: 23569 - DNA, 50 bp, synthetic construct
  source 1..50: mol_type = other DNA
ccaagaggagctttatcgaaatcccgatcggagcaaaatcagaccacctc

SEQ ID NO: 23570 - DNA, 50 bp, synthetic construct
  source 1..50: mol_type = other DNA
cttttagattccaaagaaccccttccaagcaggcgggttccattcggccc

SEQ ID NO: 23571 - DNA, 50 bp, synthetic construct; identical to SEQ ID NO: 23240
  source 1..50: mol_type = other DNA

SEQ ID NO: 23572 - DNA, 50 bp, synthetic construct
  source 1..50: mol_type = other DNA
tccacactgcgtccttccatcggcccggtccgttaccttagctggaccag

SEQ ID NO: 23573 - DNA, 50 bp, synthetic construct
  source 1..50: mol_type = other DNA
ggcagtggtggttttctcaattcgtgtccctgtgtaaacttcagagtctc

SEQ ID NO: 23574 - DNA, 50 bp, synthetic construct
  source 1..50: mol_type = other DNA
tactagccatcccctcgtaaggtcagtcgcagcttccgcatggcgctcca

SEQ ID NO: 23575 - DNA, 50 bp, synthetic construct
  source 1..50: mol_type = other DNA
gcggaggctttcccatagcctccgcgggtttccaagggagtcctacctgc

SEQ ID NO: 23576 - DNA, 50 bp, synthetic construct
  source 1..50: mol_type = other DNA
tccgagcaggcgggacccaatcagccctggattcctctctggctatccac

SEQ ID NO: 23577 - DNA, 50 bp, synthetic construct
  source 1..50: mol_type = other DNA
catcggcctccttctctttctttgtagctaaaggaatcatcgccgctcgc

SEQ ID NO: 23578 - DNA, 50 bp, synthetic construct
  source 1..50: mol_type = other DNA
tggtgtaccaaaactatagtttctaaaatagcgaacttctacctgagcgc

SEQ ID NO: 23579 - DNA, 50 bp, synthetic construct
  source 1..50: mol_type = other DNA
actaggcgtctagagacttacccctttgggccgacctgtttgaggtcagt

SEQ ID NO: 23580 - DNA, 50 bp, synthetic construct
  source 1..50: mol_type = other DNA
cgaccacgtggccaacaaggcggtccccgtatcggcccatcgattcatcc

SEQ ID NO: 23581 - DNA, 50 bp, synthetic construct; identical to SEQ ID NO: 23189
  source 1..50: mol_type = other DNA

SEQ ID NO: 23582 - DNA, 50 bp, synthetic construct
  source 1..50: mol_type = other DNA
ctgccttatcaggcaatttcccacatctacaactaatagggtccgtttag

SEQ ID NO: 23583 - DNA, 50 bp, synthetic construct; identical to SEQ ID NO: 23233
  source 1..50: mol_type = other DNA

SEQ ID NO: 23584 - DNA, 50 bp, synthetic construct
  source 1..50: mol_type = other DNA
gcttacggtaactaaataccagccgtcagtctgacgctcacgattctagg

SEQ ID NO: 23585 - DNA, 50 bp, synthetic construct
  source 1..50: mol_type = other DNA
gaaatgacgtcaaactataactcatggacatggtgtacatgtcctatcca

SEQ ID NO: 23586 - DNA, 50 bp, synthetic construct
  source 1..50: mol_type = other DNA
catcatccgttcgacgcctccctgcgtcactccatcgagtaggggccact

SEQ ID NO: 23587 - DNA, 50 bp, synthetic construct
  source 1..50: mol_type = other DNA
tcactcttacggccttactcatcgcgcttacgtcactcttagacgtaccg

SEQ ID NO: 23588 - DNA, 50 bp, synthetic construct
  source 1..50: mol_type = other DNA
cgaactgttcattaacagtccccatcccctcgcagcatacactccacttc

SEQ ID NO: 23589 - DNA, 50 bp, synthetic construct
  source 1..50: mol_type = other DNA
ctaatcgaacaaccgccccattgccgggtggttccgctgctagtcatccc

SEQ ID NO: 23590 - DNA, 50 bp, synthetic construct
  source 1..50: mol_type = other DNA
tctacgctcccgaagtggcggatagttcagaactgtttgaggcttacgca

SEQ ID NO: 23591 - DNA, 50 bp, synthetic construct
  source 1..50: mol_type = other DNA
tctgtcacagactgcccgtcaaactgaccccgccagcggaggattttaca

SEQ ID NO: 23592 - DNA, 50 bp, synthetic construct; identical to SEQ ID NO: 23280
  source 1..50: mol_type = other DNA

SEQ ID NO: 23593 - DNA, 50 bp, synthetic construct
  source 1..50: mol_type = other DNA
tttccgttacctcctggcttgggtgtaggcaacttttcccacccctactc

SEQ ID NO: 23594 - DNA, 50 bp, synthetic construct
  source 1..50: mol_type = other DNA
gacttttcccgccaattcatgcatctacatctgggctttggttcactgga

SEQ ID NO: 23595 - DNA, 50 bp, synthetic construct
  source 1..50: mol_type = other DNA
ctcggacggtaacactacagaaactacaacaccaccacaccactcacaca

SEQ ID NO: 23596 - DNA, 50 bp, synthetic construct
  source 1..50: mol_type = other DNA
ggatcatgctctcctggccctacctgcgtggagaccacgtggtcaacagt

SEQ ID NO: 23597 - DNA, 50 bp, synthetic construct
  source 1..50: mol_type = other DNA
cccacgcagacttcttctacgcgccatctcctcgttacacgtctccgtct

SEQ ID NO: 23598 - DNA, 50 bp, synthetic construct
  source 1..50: mol_type = other DNA
tacgcatcggaattaaccacttcaaccactagggcatgacagctcttttc

SEQ ID NO: 23599 - DNA, 50 bp, synthetic construct
  source 1..50: mol_type = other DNA
ccgtgcaattgtcgcacagtagtacagtacttatttatcactgtactccc

SEQ ID NO: 23600 - DNA, 50 bp, synthetic construct; identical to SEQ ID NO: 23203
  source 1..50: mol_type = other DNA

SEQ ID NO: 23601 - DNA, 50 bp, synthetic construct
  source 1..50: mol_type = other DNA
cgcgatacgcgcctgtaacgaaccacccatcaaactgaccccaccagcgg

SEQ ID NO: 23602 - DNA, 50 bp, synthetic construct
  source 1..50: mol_type = other DNA
ggaacaccctacctcggcagattccactccgagcactaaccctgattcag

SEQ ID NO: 23603 - DNA, 50 bp, synthetic construct
  source 1..50: mol_type = other DNA
aatatgtccccctattgtcaatctttactgacgattatggcgtattcgcg

SEQ ID NO: 23604 - DNA, 50 bp, synthetic construct
  source 1..50: mol_type = other DNA
gcagtgaccgctccaactcacagtgctctgtgcatcggcgtcactttcgc

SEQ ID NO: 23605 - DNA, 50 bp, synthetic construct
  source 1..50: mol_type = other DNA
catacccttccgtgtggtttcttccaatatcaggacattcgcttttcgta

SEQ ID NO: 23606 - DNA, 50 bp, synthetic construct
  source 1..50: mol_type = other DNA
ggcattctgattccaaaggtccccttccgagcaggcgggacccaatcagc

SEQ ID NO: 23607 - DNA, 50 bp, synthetic construct
  source 1..50: mol_type = other DNA
tgattccaaaggactagttgcgattagcctagtcccaatcagcccaggat

SEQ ID NO: 23608 - DNA, 50 bp, synthetic construct
  source 1..50: mol_type = other DNA
attccctgcgcattcgccttcagtcaaacctttctctgctcttttcgaca

SEQ ID NO: 23609 - DNA, 50 bp, synthetic construct
  source 1..50: mol_type = other DNA
accgttccaattcctgaattccagacttcggcgtcgctctcgttcagaat

SEQ ID NO: 23610 - DNA, 50 bp, synthetic construct
  source 1..50: mol_type = other DNA
aaccaccccattaccggatggttcggctgctaggtatcgaccaaactctc

SEQ ID NO: 23611 - DNA, 50 bp, synthetic construct
  source 1..50: mol_type = other DNA
gtgtaggcaacttttcccacctctactgcacacctatcccctctttaagg

SEQ ID NO: 23612 - DNA, 50 bp, synthetic construct
  source 1..50: mol_type = other DNA
catcagcttacctacttgcccacctataagggcatggctggtacctggcc

SEQ ID NO: 23613 - DNA, 50 bp, synthetic construct
  source 1..50: mol_type = other DNA
cgggaatccaaagaccttaagattggacgccggcactttggccagccccc

SEQ ID NO: 23614 - DNA, 50 bp, synthetic construct
  source 1..50: mol_type = other DNA
ctccgcatcagctacgtgtatgccaactttaaggcatcggtggctttgaa

SEQ ID NO: 23615 - DNA, 50 bp, synthetic construct
  source 1..50: mol_type = other DNA
atgcatcccccgttcgcaataggcctaaatgacccacatttccctcgcgt

SEQ ID NO: 23616 - DNA, 50 bp, synthetic construct
  source 1..50: mol_type = other DNA
tgagtggacctttccacctggtatctcccactgtcagggcatccgcttta

SEQ ID NO: 23617 - DNA, 50 bp, synthetic construct; identical to SEQ ID NO: 23463
  source 1..50: mol_type = other DNA

SEQ ID NO: 23618 - DNA, 50 bp, synthetic construct
  source 1..50: mol_type = other DNA
tccttggaatgggcccgaacttaacgttgacttactacacctctgtacag

SEQ ID NO: 23619 - DNA, 50 bp, synthetic construct
  source 1..50: mol_type = other DNA
ggatcatgctctcctggcccttcctgcgtggagaccacacggtcaatagc

SEQ ID NO: 23620 - DNA, 50 bp, synthetic construct
  source 1..50: mol_type = other DNA
gtcctacttcagggccattgtgccctacctccaggcgtggctattcgcaa

SEQ ID NO: 23621 - DNA, 50 bp, synthetic construct
  source 1..50: mol_type = other DNA
ggacccctattgtccgaatagtgagggttctcaagtgtagctgcctcacc

SEQ ID NO: 23622 - DNA, 50 bp, synthetic construct
  source 1..50: mol_type = other DNA
cctccattttgaggtacctcccggcttggctggaggcaacttttccgccg

SEQ ID NO: 23623 - DNA, 50 bp, synthetic construct; identical to SEQ ID NO: 23252
  source 1..50: mol_type = other DNA

SEQ ID NO: 23624 - DNA, 50 bp, synthetic construct
  source 1..50: mol_type = other DNA
taggtaactgggcgtctagagacttacccctttgggtgtactcttgtgga

SEQ ID NO: 23625 - DNA, 50 bp, synthetic construct
  source 1..50: mol_type = other DNA
aggctgcctggcccgccctcagtattttgccgaacggtccccttgtccga

SEQ ID NO: 23626 - DNA, 50 bp, synthetic construct
  source 1..50: mol_type = other DNA
ccccccagcgccgcgcccgcgcaaccctaggggggagcatcatccagtcg

SEQ ID NO: 23627 - DNA, 50 bp, synthetic construct
  source 1..50: mol_type = other DNA
cgcctgcccactcattgcgcacccattggacggagtatgtccccctattg

SEQ ID NO: 23628 - DNA, 50 bp, synthetic construct
  source 1..50: mol_type = other DNA
tctcacgcattatcgagtgaccagctcactaacacgcggcttctacaggc

SEQ ID NO: 23629 - DNA, 50 bp, synthetic construct
  source 1..50: mol_type = other DNA
gtcgagtgatcagctcctcaaaccgcacctattattagcccgtagttcgt

SEQ ID NO: 23630 - DNA, 50 bp, synthetic construct
  source 1..50: mol_type = other DNA
tcgacgcccctcggcattcatccgaaactaggcgtctaaaggcttacctc

SEQ ID NO: 23631 - DNA, 50 bp, synthetic construct
  source 1..50: mol_type = other DNA
gtacccacgattccaggtacaggatttcctcttgttaggcctggttgtcg

SEQ ID NO: 23632 - DNA, 50 bp, synthetic construct
  source 1..50: mol_type = other DNA
tctattactgccatgagttgttccttcactgccgattgaggcacggtcgt

SEQ ID NO: 23633 - DNA, 50 bp, synthetic construct
  source 1..50: mol_type = other DNA
tagtcgggtctggcaacccattcagattcgtatggacagactggctatcg

SEQ ID NO: 23634 - DNA, 50 bp, synthetic construct
  source 1..50: mol_type = other DNA
accttgactctgtgccaggtttgaggatgccctccgtcgtcactccttat

SEQ ID NO: 23635 - DNA, 50 bp, synthetic construct
  source 1..50: mol_type = other DNA
tggcgtttggctgtgtccacctgtccttctcttaagattccggtcgccct

SEQ ID NO: 23636 - DNA, 50 bp, synthetic construct
  source 1..50: mol_type = other DNA
tccgagcaggagagtcccattcagccctggattcggctcctgttatcagc

SEQ ID NO: 23637 - DNA, 50 bp, synthetic construct
  source 1..50: mol_type = other DNA
tgaatcactggctatcgcgtatcatgacacttcctttccacttttcctgg

SEQ ID NO: 23638 - DNA, 50 bp, synthetic construct
  source 1..50: mol_type = other DNA
aatcgatcaaccgtcccgttgccggatggttccgctgctagtcatcggct

SEQ ID NO: 23639 - DNA, 50 bp, synthetic construct
  source 1..50: mol_type = other DNA
atggttaaaggagccttttgccattatcacgcacatttgtatgagggttc

SEQ ID NO: 23640 - DNA, 50 bp, synthetic construct
  source 1..50: mol_type = other DNA
gcacctactccgatttggcacacgtacactatggaccatccccaacacac

SEQ ID NO: 23641 - DNA, 50 bp, synthetic construct
  source 1..50: mol_type = other DNA
ccgggacgcggcttttacaggccccgattttgtgttgtggcttcggcacc

SEQ ID NO: 23642 - DNA, 50 bp, synthetic construct; identical to SEQ ID NO: 23150
  source 1..50: mol_type = other DNA

SEQ ID NO: 23643 - DNA, 50 bp, synthetic construct; identical to SEQ ID NO: 23199
  source 1..50: mol_type = other DNA

SEQ ID NO: 23644 - DNA, 50 bp, synthetic construct; identical to SEQ ID NO: 23261
  source 1..50: mol_type = other DNA

SEQ ID NO: 23645 - DNA, 50 bp, synthetic construct
  source 1..50: mol_type = other DNA
gcaaaagtcagcgaacaggacctgggcttcgccctactagatcgggaccc

SEQ ID NO: 23646 - DNA, 50 bp, synthetic construct
  source 1..50: mol_type = other DNA
tttcgtagattcacgcttcggggggagttctactctaaagggtactaaaa

SEQ ID NO: 23647 - DNA, 50 bp, synthetic construct; identical to SEQ ID NO: 23249
  source 1..50: mol_type = other DNA

SEQ ID NO: 23648 - DNA, 50 bp, synthetic construct
  source 1..50: mol_type = other DNA
cccacgattccaggcacgggctctcctcttcttaggcctggtggacgatt

SEQ ID NO: 23649 - DNA, 50 bp, synthetic construct
  source 1..50: mol_type = other DNA
gatcttttgggcgatttgaataggaactccatgggcatggcatttgcctg

SEQ ID NO: 23650 - DNA, 50 bp, synthetic construct
  source 1..50: mol_type = other DNA
cataaagtacatgtcctatccaccctccgtctcttccgtcgtgcggtcac

SEQ ID NO: 23651 - DNA, 50 bp, synthetic construct
  source 1..50: mol_type = other DNA
tggacggaatatgtccccctattgtcaatctttactgacgattatggcgt

SEQ ID NO: 23652 - DNA, 50 bp, synthetic construct
  source 1..50: mol_type = other DNA
taggcgtggctggcaccacattcagattcgtatggacagactggctatcg

SEQ ID NO: 23653 - DNA, 50 bp, synthetic construct
  source 1..50: mol_type = other DNA
attcgcacttcggggggagttctactctatagggtaggctttcctcattt

SEQ ID NO: 23654 - DNA, 50 bp, synthetic construct
  source 1..50: mol_type = other DNA
gccgagtggttccgaagctgcccatcggccggactctcccgctggccggt

SEQ ID NO: 23655 - DNA, 50 bp, synthetic construct
  source 1..50: mol_type = other DNA
ggctgcccggcccgccctcagtattttgccgaacggtccccttgtccgaa

SEQ ID NO: 23656 - DNA, 50 bp, synthetic construct; identical to SEQ ID NO: 23167
  source 1..50: mol_type = other DNA

SEQ ID NO: 23657 - DNA, 50 bp, synthetic construct
  source 1..50: mol_type = other DNA
tgcctcggcatccctttggctcagaattatcccgcgcaatcatactacag

SEQ ID NO: 23658 - DNA, 50 bp, synthetic construct
  source 1..50: mol_type = other DNA
gctgaactccgcgtctcttagccaggtccgttgacaaattgtttttgtgt

SEQ ID NO: 23659 - DNA, 50 bp, synthetic construct; identical to SEQ ID NO: 23177
  source 1..50: mol_type = other DNA

SEQ ID NO: 23660 - DNA, 50 bp, synthetic construct
  source 1..50: mol_type = other DNA
cctcgcgccctggacttggccattccgttcgcgtaattgtccacactgcg

SEQ ID NO: 23661 - DNA, 50 bp, synthetic construct
  source 1..50: mol_type = other DNA
tgctttcagcccgaatcactaggccaccaaggcgtaccttcccggtagcg

SEQ ID NO: 23662 - DNA, 50 bp, synthetic construct
  source 1..50: mol_type = other DNA
ccacttctacggccaatgggcgctgatctgcctttctggggtacctcgaa

SEQ ID NO: 23663 - DNA, 50 bp, synthetic construct
  source 1..50: mol_type = other DNA
ttgcttgaacctctatcgaccaagagaggctttatcgaaatcccgatcgc

SEQ ID NO: 23664 - DNA, 50 bp, synthetic construct
  source 1..50: mol_type = other DNA
gttgacaacagcacggttgccgtatcgtcccttcgcttcacgcctaccct

SEQ ID NO: 23665 - DNA, 50 bp, synthetic construct
  source 1..50: mol_type = other DNA
cgtctcatgacacttcctttccacttttcctggggccctcccctcacttt

SEQ ID NO: 23666 - DNA, 50 bp, synthetic construct
  source 1..50: mol_type = other DNA
gaccccttccaagtaggcgggtcccattcagccccggattcggctcctgc

SEQ ID NO: 23667 - DNA, 50 bp, synthetic construct; identical to SEQ ID NO: 23243
  source 1..50: mol_type = other DNA

SEQ ID NO: 23668 - DNA, 50 bp, synthetic construct; identical to SEQ ID NO: 23429
  source 1..50: mol_type = other DNA

SEQ ID NO: 23669 - DNA, 50 bp, synthetic construct; identical to SEQ ID NO: 23496
  source 1..50: mol_type = other DNA

SEQ ID NO: 23670 - DNA, 50 bp, synthetic construct
  source 1..50: mol_type = other DNA
gcaagtccggcttccccagtcttttagatgggaagtgtaccaattccgca

SEQ ID NO: 23671 - DNA, 50 bp, synthetic construct
  source 1..50: mol_type = other DNA
tcacgcacatttgtatgagggctcttttaggcgatttgaattaggaactc

SEQ ID NO: 23672 - DNA, 50 bp, synthetic construct
  source 1..50: mol_type = other DNA
gagatcttctgtagactttctctaatttctaaatagccactacctacccc

SEQ ID NO: 23673 - DNA, 50 bp, synthetic construct
  source 1..50: mol_type = other DNA
gtaacagttttccctttgtcgggtctgggtgtcgattccagggtttcata

SEQ ID NO: 23674 - DNA, 50 bp, synthetic construct
  source 1..50: mol_type = other DNA
ggcttacccccttgggcggccggcagtacccggccgtggcggatacccgc

SEQ ID NO: 23675 - DNA, 50 bp, synthetic construct
  source 1..50: mol_type = other DNA
tttcgtagattcacgcttcgggtggagttctactctaaagggtactaaaa

SEQ ID NO: 23676 - DNA, 50 bp, synthetic construct
  source 1..50: mol_type = other DNA
cgagtgatcagctcctcagcccgcacctattattagcccatagttcaaca

SEQ ID NO: 23677 - DNA, 50 bp, synthetic construct
  source 1..50: mol_type = other DNA
cgtgacttatcggatcgccggctctccaatcgcttcgaatagtttgagtc

SEQ ID NO: 23678 - DNA, 50 bp, synthetic construct; identical to SEQ ID NO: 23251
  source 1..50: mol_type = other DNA

SEQ ID NO: 23679 - DNA, 50 bp, synthetic construct
  source 1..50: mol_type = other DNA
ctagacttcgtcactaggcttcggggtcacttgccgccggcattgatatt

SEQ ID NO: 23680 - DNA, 50 bp, synthetic construct
  source 1..50: mol_type = other DNA
gtcataacccaaagattggtcggcggcactgggccgccaccctgttacgg

SEQ ID NO: 23681 - DNA, 50 bp, synthetic construct
  source 1..50: mol_type = other DNA
cactccatcgagttggggtcgctaccaacagaccccgatttacacacctg

SEQ ID NO: 23682 - DNA, 50 bp, synthetic construct
  source 1..50: mol_type = other DNA
gacaagcgggtaatttcgccgtgcgctcgacccaagtcttgcagcactct

SEQ ID NO: 23683 - DNA, 50 bp, synthetic construct
  source 1..50: mol_type = other DNA
ctcaagtgtagctgcccctccaaaccgtggagctacagccgagcagcgta

SEQ ID NO: 23684 - DNA, 50 bp, synthetic construct
  source 1..50: mol_type = other DNA
ttttcgtagccgcgctccaagtttgacgggcatgggatttggctgtgtcc

SEQ ID NO: 23685 - DNA, 50 bp, synthetic construct
  source 1..50: mol_type = other DNA
ctgcggtcagagactcctccgcgacaaccctatggtgggaacgttatagc

SEQ ID NO: 23686 - DNA, 50 bp, synthetic construct
  source 1..50: mol_type = other DNA
tgagaactccacgactttaagattggacgccggcacttaggccagccccc

SEQ ID NO: 23687 - DNA, 50 bp, synthetic construct
  source 1..50: mol_type = other DNA
atggaggtcctcactacacctctgcgtcatcactgttacggcggtagact

SEQ ID NO: 23688 - DNA, 50 bp, synthetic construct
  source 1..50: mol_type = other DNA
ctttaacatcatagccacttctacggctaatgggcgctaccctgcttttc

SEQ ID NO: 23689 - DNA, 50 bp, synthetic construct
  source 1..50: mol_type = other DNA
tcgcgcttgacctcccgaactcacgcgcccttcaaccgccttaagcaaca

SEQ ID NO: 23690 - DNA, 50 bp, synthetic construct
  source 1..50: mol_type = other DNA
gccctcttcccaacaattccttgagccgtttaaccggggcattgaagccc

SEQ ID NO: 23691 - DNA, 50 bp, synthetic construct
  source 1..50: mol_type = other DNA
tcggggggaattctactctatagggtaagctttcttcatttgggggaact

SEQ ID NO: 23692 - DNA, 50 bp, synthetic construct
  source 1..50: mol_type = other DNA
gaggttgggatttatgatgggtcactggctatcgcatatcatgacacttc

SEQ ID NO: 23693 - DNA, 50 bp, synthetic construct
  source 1..50: mol_type = other DNA
tctctcgctacaccactgcctcttcactgtcaggccggcagactgcctta

SEQ ID NO: 23694 - DNA, 50 bp, synthetic construct
  source 1..50: mol_type = other DNA
gtagagggttgggatttatgagggatcactggctatcacttggtcatggc

SEQ ID NO: 23695 - DNA, 50 bp, synthetic construct
  source 1..50: mol_type = other DNA
tacccacgattccaggtacaggatttcctcttcttaggcctggtagtcga

SEQ ID NO: 23696 - DNA, 50 bp, synthetic construct
  source 1..50: mol_type = other DNA
ggaatacttattcctggccgattaaggcacggtcgtcggcgccattatgc

SEQ ID NO: 23697 - DNA, 50 bp, synthetic construct
  source 1..50: mol_type = other DNA
atagctttttactcagacgctcagtcaccacgcaccgctccgattgggca

SEQ ID NO: 23698 - DNA, 50 bp, synthetic construct
  source 1..50: mol_type = other DNA
gctttcgcacccctcgcttgtcctaatctatgggaccatcaggtgcggca

SEQ ID NO: 23699 - DNA, 50 bp, synthetic construct
  source 1..50: mol_type = other DNA
ctacgctcccgaagtggcggatagttcagaactatttgaggcttacgcgt

SEQ ID NO: 23700 - DNA, 50 bp, synthetic construct
  source 1..50: mol_type = other DNA
cattcagccccggattccactcctgctctcagcatcggctacctgttgtc

SEQ ID NO: 23701 - DNA, 50 bp, synthetic construct
  source 1..50: mol_type = other DNA
ttgtagccatcccctcgtaaggtgaggcgcagcttccactccgcactcgg

SEQ ID NO: 23702 - DNA, 50 bp, synthetic construct
  source 1..50: mol_type = other DNA
tgacttgaatttttatccatatagctcccttggcggacttgactttgtag

SEQ ID NO: 23703 - DNA, 50 bp, synthetic construct
  source 1..50: mol_type = other DNA
tgtgccgggtctgaggatgccctccgtcgtcaccccttagaatctgttac

SEQ ID NO: 23704 - DNA, 50 bp, synthetic construct
  source 1..50: mol_type = other DNA
gggggattccgatttatggtgaatcactggctatcgcgtatcatgacact

SEQ ID NO: 23705 - DNA, 50 bp, synthetic construct
  source 1..50: mol_type = other DNA
actttgggacacccttcgtcctccctggtaggaggttcggatttatgatg

SEQ ID NO: 23706 - DNA, 50 bp, synthetic construct
  source 1..50: mol_type = other DNA
tcaacctatcagttttccctttctcgggtctgggcgtcgattccagggtt

SEQ ID NO: 23707 - DNA, 50 bp, synthetic construct
  source 1..50: mol_type = other DNA
cgtcactccactcctgactcagtttacgaatcaagacgcggtggttcgac

SEQ ID NO: 23708 - DNA, 50 bp, synthetic construct; identical to SEQ ID NO: 23190
  source 1..50: mol_type = other DNA

SEQ ID NO: 23709 - DNA, 50 bp, synthetic construct
  source 1..50: mol_type = other DNA
gagccgggccaaccgttagcccacagctcacattagcgtgttcgcccgaa

SEQ ID NO: 23710 - DNA, 50 bp, synthetic construct
  source 1..50: mol_type = other DNA
cactgcgtctgtccatcgacgtcacgcggctaccaacacgcataaattcc

SEQ ID NO: 23711 - DNA, 50 bp, synthetic construct
  source 1..50: mol_type = other DNA
cctgaatggcgaccacatggtcaacagaacggtttccgtagcgacccatc

SEQ ID NO: 23712 - DNA, 50 bp, synthetic construct
  source 1..50: mol_type = other DNA
tcttttcggcgataacaaacggtacgcgggcatggcatttggctgtgtcc

SEQ ID NO: 23713 - DNA, 50 bp, synthetic construct; identical to SEQ ID NO: 23259
  source 1..50: mol_type = other DNA

SEQ ID NO: 23714 - DNA, 50 bp, synthetic construct
  source 1..50: mol_type = other DNA
ccccgtctaattctcaatcaggaacgactttggactgtcatgtctctcgg

SEQ ID NO: 23715 - DNA, 50 bp, synthetic construct
  source 1..50: mol_type = other DNA
agccccgctccgcgctactacccccggaatgccgggcttaggccactagg

SEQ ID NO: 23716 - DNA, 50 bp, synthetic construct
  source 1..50: mol_type = other DNA
aggtctcatcctgctctgtgcactttggaacagacttgctcgcctctggt

SEQ ID NO: 23717 - DNA, 50 bp, synthetic construct
  source 1..50: mol_type = other DNA
tcgtccatgctttcatcctgaatcactaggccaccgtatttcaccctaac

SEQ ID NO: 23718 - DNA, 50 bp, synthetic construct
  source 1..50: mol_type = other DNA
ccacccttctgccccccgggtggggggttccgatttatgatgaaccactg

SEQ ID NO: 23719 - DNA, 50 bp, synthetic construct; identical to SEQ ID NO: 23174
  source 1..50: mol_type = other DNA

SEQ ID NO: 23720 - DNA, 50 bp, synthetic construct
  source 1..50: mol_type = other DNA
gaggggctttccgtaaatccacggcgcagcctaccagtggcactctccat

SEQ ID NO: 23721 - DNA, 50 bp, synthetic construct; identical to SEQ ID NO: 23223
  source 1..50: mol_type = other DNA

SEQ ID NO: 23722 - DNA, 50 bp, synthetic construct
  source 1..50: mol_type = other DNA
catggacttcacgcattggcgttcctcgcgggatcccattttgaccacta

SEQ ID NO: 23723 - DNA, 50 bp, synthetic construct
  source 1..50: mol_type = other DNA
accccaccagcggaggttttcgcattgcctccgaagatttccacgggagg

SEQ ID NO: 23724 - DNA, 50 bp, synthetic construct; identical to SEQ ID NO: 23481
  source 1..50: mol_type = other DNA

SEQ ID NO: 23725 - DNA, 50 bp, synthetic construct
  source 1..50: mol_type = other DNA
ctaggatcgtcttaccaaaaccctttcggtcggtttctcccactttcggg

SEQ ID NO: 23726 - DNA, 50 bp, synthetic construct; identical to SEQ ID NO: 23217
  source 1..50: mol_type = other DNA

SEQ ID NO: 23727 - DNA, 50 bp, synthetic construct
  source 1..50: mol_type = other DNA
cctcgaaatgagatcagaccgtaactataggcctgaagagacgcatcgta

SEQ ID NO: 23728 - DNA, 50 bp, synthetic construct
  source 1..50: mol_type = other DNA
ctaagggcatccgtttaggcgcccctctcagcttggactctcatatgcct

SEQ ID NO: 23729 - DNA, 50 bp, synthetic construct
  source 1..50: mol_type = other DNA
agccctatttcccaggagtgtcgttacactccgcgtctcttatccaggtc

SEQ ID NO: 23730 - DNA, 50 bp, synthetic construct; identical to SEQ ID NO: 23648
  source 1..50: mol_type = other DNA

SEQ ID NO: 23731 - DNA, 50 bp, synthetic construct
  source 1..50: mol_type = other DNA
agagtcccagcagtttctgatactgcaactatcctacgtccacatgtccg

SEQ ID NO: 23732 - DNA, 50 bp, synthetic construct; identical to SEQ ID NO: 23148
  source 1..50: mol_type = other DNA

SEQ ID NO: 23733 - DNA, 50 bp, synthetic construct
  source 1..50: mol_type = other DNA
gttctcgctaacggagtcatcgccgctcgcttctccgtcctcccgtttgg

SEQ ID NO: 23734 - DNA, 50 bp, synthetic construct
  source 1..50: mol_type = other DNA
gattcgtatggacagactggctatcgcatggtcatggcactccctttcca

SEQ ID NO: 23735 - DNA, 50 bp, synthetic construct
  source 1..50: mol_type = other DNA
gcacccgcgtcctataaactaccctcgacagggatcatgctctcctggcc

SEQ ID NO: 23736 - DNA, 50 bp, synthetic construct; identical to SEQ ID NO: 23170
  source 1..50: mol_type = other DNA

SEQ ID NO: 23737 - DNA, 50 bp, synthetic construct
  source 1..50: mol_type = other DNA
ggggccctcccctcacttttcttggactttgagacacgaatgttcgtgta

SEQ ID NO: 23738 - DNA, 50 bp, synthetic construct
  source 1..50: mol_type = other DNA
tcccaacaattccttgagccgttttaatggggcattgaagccctcttccc

SEQ ID NO: 23739 - DNA, 50 bp, synthetic construct
  source 1..50: mol_type = other DNA
tttcggagctgcactcccgtattgcgcgggcatgggatttggctgagtcc

SEQ ID NO: 23740 - DNA, 50 bp, synthetic construct
  source 1..50: mol_type = other DNA
cagtctgtcacactctattcaaagtaacagctttccctttgtcgggtcta

SEQ ID NO: 23741 - DNA, 50 bp, synthetic construct
  source 1..50: mol_type = other DNA
tccgaaacttcgtccgtgcggtcacaaacacctcggtaggaactttatgc

SEQ ID NO: 23742 - DNA, 50 bp, synthetic construct
  source 1..50: mol_type = other DNA
ctgcaccagtcgacgctattcggtaccagtcggcgttcgtccgttactgg

SEQ ID NO: 23743 - DNA, 50 bp, synthetic construct
  source 1..50: mol_type = other DNA
gtgggccactttaacttcatggtcacttctacgaccaatgggcgcggtcc

SEQ ID NO: 23744 - DNA, 50 bp, synthetic construct
  source 1..50: mol_type = other DNA
tctatcgagcatgaggggctttacgtaaatccacgtcggaacactcaatg

SEQ ID NO: 23745 - DNA, 50 bp, synthetic construct
  source 1..50: mol_type = other DNA
gctcttttcggagccgcactcccgataccggcgggcatggggtttggctg

SEQ ID NO: 23746 - DNA, 50 bp, synthetic construct
  source 1..50: mol_type = other DNA
gttctgtaaagtactcatcttgggaaaccttttaccctggtatctgccac

SEQ ID NO: 23747 - DNA, 50 bp, synthetic construct
  source 1..50: mol_type = other DNA
tagtctggtttggccaacgcgcactatgggcagcccccaacgcaacggcc

SEQ ID NO: 23748 - DNA, 50 bp, synthetic construct
  source 1..50: mol_type = other DNA
acatctaaggacgtgatggctaccttacttcgtcactgtgtcttcctatt

SEQ ID NO: 23749 - DNA, 50 bp, synthetic construct; identical to SEQ ID NO: 23255
  source 1..50: mol_type = other DNA

SEQ ID NO: 23750 - DNA, 50 bp, synthetic construct
  source 1..50: mol_type = other DNA
tacaactagaaccgtccgtttaggtggtactcttagcttggactatcata

SEQ ID NO: 23751 - DNA, 50 bp, synthetic construct
  source 1..50: mol_type = other DNA
tcgtcttgccaaaaccctttcggccggtctctcccactttcggggcattc

SEQ ID NO: 23752 - DNA, 50 bp, synthetic construct
  source 1..50: mol_type = other DNA
tggcgtaaatcctgaattcaacaattggcttgccgtacccttccggccag

SEQ ID NO: 23753 - DNA, 50 bp, synthetic construct
  source 1..50: mol_type = other DNA
aacaaggcggtcctcgtatcgacccgttgatgcatgcctagcctatttgc

SEQ ID NO: 23754 - DNA, 50 bp, synthetic construct
  source 1..50: mol_type = other DNA
cattgactgcgactacgagctttcacacccatagtttgtcctaatctatg

SEQ ID NO: 23755 - DNA, 50 bp, synthetic construct
  source 1..50: mol_type = other DNA
ggggactgcccctcactttttcttggactttggaacacaaatgttcgtgg

SEQ ID NO: 23756 - DNA, 50 bp, synthetic construct
  source 1..50: mol_type = other DNA
ttttcgtggggccctcccctcactttctcaaggactttggcacgcggatg

SEQ ID NO: 23757 - DNA, 50 bp, synthetic construct; identical to SEQ ID NO: 23144
  source 1..50: mol_type = other DNA

SEQ ID NO: 23758 - DNA, 50 bp, synthetic construct; identical to SEQ ID NO: 23212
  source 1..50: mol_type = other DNA

SEQ ID NO: 23759 - DNA, 50 bp, synthetic construct
  source 1..50: mol_type = other DNA
ccaaggccccggtgccaattgcaggggcccactcagcccaggattccgct

SEQ ID NO: 23760 - DNA, 50 bp, synthetic construct
  source 1..50: mol_type = other DNA
acccgcacttccaactccgtactacccctcgggtaccaacacccactcac

SEQ ID NO: 23761 - DNA, 50 bp, synthetic construct
  source 1..50: mol_type = other DNA
ggcagtggtggttttctcaatttgtgtccctgtgtatacttcagagcctc

SEQ ID NO: 23762 - DNA, 50 bp, synthetic construct
  source 1..50: mol_type = other DNA
cctgactctgtgccgggtttgaggatgccctccgtcgtcatcccttaaaa

SEQ ID NO: 23763 - DNA, 50 bp, synthetic construct; identical to SEQ ID NO: 23153
  source 1..50: mol_type = other DNA

SEQ ID NO: 23764 - DNA, 50 bp, synthetic construct
  source 1..50: mol_type = other DNA
tgacttacccgatcccccggtgtttcgaatggcttgggatagtttgaagc

SEQ ID NO: 23765 - DNA, 50 bp, synthetic construct
  source 1..50: mol_type = other DNA
tgcgacccatcctctcgcaggggtagccccgcttcgccgccgcgttcgga

SEQ ID NO: 23766 - DNA, 50 bp, synthetic construct
  source 1..50: mol_type = other DNA
gcgccagcggtctagcgcgcctcggcattccactttatggcgagacaagc

SEQ ID NO: 23767 - DNA, 50 bp, synthetic construct
  source 1..50: mol_type = other DNA
ttgacaccttcatggtatgctcatgttggcgcatgaaaaacatcttgcca

SEQ ID NO: 23768 - DNA, 50 bp, synthetic construct; identical to SEQ ID NO: 23278
  source 1..50: mol_type = other DNA

SEQ ID NO: 23769 - DNA, 50 bp, synthetic construct
  source 1..50: mol_type = other DNA
cggggcatggacctgcactcggcagaaggctagcacaacagggttcatcg

SEQ ID NO: 23770 - DNA, 50 bp, synthetic construct; identical to SEQ ID NO: 23165
  source 1..50: mol_type = other DNA

SEQ ID NO: 23771 - DNA, 50 bp, synthetic construct
  source 1..50: mol_type = other DNA
tcccaagccgacaagcggctaatttcaccatgcgctcgacccaagtcttg

SEQ ID NO: 23772 - DNA, 50 bp, synthetic construct
  source 1..50: mol_type = other DNA
gtaacttaaacccactaactacacatcctatccggcctccgaaacttagt

SEQ ID NO: 23773 - DNA, 50 bp, synthetic construct; identical to SEQ ID NO: 23490
  source 1..50: mol_type = other DNA

SEQ ID NO: 23774 - DNA, 50 bp, synthetic construct
  source 1..50: mol_type = other DNA
cccccgcgctttcccccttccccctcctctccccccttcccccccccccc

SEQ ID NO: 23775 - DNA, 50 bp, synthetic construct
  source 1..50: mol_type = other DNA
ttgtgtcgagatacgatttagctttctactgcatataccccactgtggac

SEQ ID NO: 23776 - DNA, 50 bp, synthetic construct; identical to SEQ ID NO: 23569
  source 1..50: mol_type = other DNA

SEQ ID NO: 23777 - DNA, 50 bp, synthetic construct
  source 1..50: mol_type = other DNA
gtacctcactgcacctctgcctcttcactgtcaggacggccgactgcctt

SEQ ID NO: 23778 - DNA, 50 bp, synthetic construct; identical to SEQ ID NO: 23200
  source 1..50: mol_type = other DNA

SEQ ID NO: 23779 - DNA, 50 bp, synthetic construct
  source 1..50: mol_type = other DNA
actacccctcgcttcaaatcatcgcttcaatcactacagtgtgacggttc

SEQ ID NO: 23780 - DNA, 50 bp, synthetic construct
  source 1..50: mol_type = other DNA
cacgcattatcgagtgaccagctcactgagacgcggcttttaaattgccc

SEQ ID NO: 23781 - DNA, 50 bp, synthetic construct
  source 1..50: mol_type = other DNA
cacaaaggcgtaccttccctgtagcgagtttcctattttccatgaggccc

SEQ ID NO: 23782 - DNA, 50 bp, synthetic construct
  source 1..50: mol_type = other DNA
tggggcattgaagccctcttccccacgacgtcgctacctcggcgtctctt

SEQ ID NO: 23783 - DNA, 50 bp, synthetic construct; identical to SEQ ID NO: 23146
  source 1..50: mol_type = other DNA

SEQ ID NO: 23784 - DNA, 50 bp, synthetic construct
  source 1..50: mol_type = other DNA
cgcgtctcttatccaggtccgttgacaaattgtttttgtgtaccgacacg

SEQ ID NO: 23785 - DNA, 50 bp, synthetic construct
  source 1..50: mol_type = other DNA
atcaattcaccttttcctacaccttaacgtgtctgttggtcctacaaccg

SEQ ID NO: 23786 - DNA, 50 bp, synthetic construct
  source 1..50: mol_type = other DNA
caaacttttcccgcaattcaacgtatattacccgggctttggcccactgg

SEQ ID NO: 23787 - DNA, 50 bp, synthetic construct
  source 1..50: mol_type = other DNA
tacacgttcgtaacttagcttcggggtcacttgccgccggcattgatatt

SEQ ID NO: 23788 - DNA, 50 bp, synthetic construct
  source 1..50: mol_type = other DNA
tcgtgacaaactaactccccaggtagggcctaatggttagagtctatttg

SEQ ID NO: 23789 - DNA, 50 bp, synthetic construct
  source 1..50: mol_type = other DNA
ccgccttcttcgtaacagttccttgagccgttttactggggcattgaagc

SEQ ID NO: 23790 - DNA, 50 bp, synthetic construct
  source 1..50: mol_type = other DNA
gccccccgtacctcccactcttgactactccctgtgtgcgcacacacctg

SEQ ID NO: 23791 - DNA, 50 bp, synthetic construct
  source 1..50: mol_type = other DNA
caacgcaccggccccaacgccctcgcacacagggccggggctgcccggcc

SEQ ID NO: 23792 - DNA, 50 bp, synthetic construct
  source 1..50: mol_type = other DNA
tcacgcattatcgagtgatcagctcactgggacgcggcttttacatggcc

SEQ ID NO: 23793 - DNA, 50 bp, synthetic construct
  source 1..50: mol_type = other DNA
cttcccctcactttctcttggactttggcacacgaatgttcttcaagctc

SEQ ID NO: 23794 - DNA, 50 bp, synthetic construct
  source 1..50: mol_type = other DNA
gtggcataagacttaggtatccctatgccccccttggcggacttgacttt

SEQ ID NO: 23795 - DNA, 50 bp, synthetic construct
  source 1..50: mol_type = other DNA
acagtccatccgtcaaactgaccccgccagcggagggttttacattgcct

SEQ ID NO: 23796 - DNA, 50 bp, synthetic construct
  source 1..50: mol_type = other DNA
cgtcctaggtctcatgtagctctgtgcaccttggaactaccttcctcgcc

SEQ ID NO: 23797 - DNA, 50 bp, synthetic construct; identical to SEQ ID NO: 23235
  source 1..50: mol_type = other DNA

SEQ ID NO: 23798 - DNA, 50 bp, synthetic construct
  source 1..50: mol_type = other DNA
tctacccgtccgtttaggtgggcaactcggcttggactgtcatgcctcag

SEQ ID NO: 23799 - DNA, 50 bp, synthetic construct
  source 1..50: mol_type = other DNA
tgtgcttttcggacttgtcggtagacataggtctcatggcggcctgtgca

SEQ ID NO: 23800 - DNA, 50 bp, synthetic construct
  source 1..50: mol_type = other DNA
cctcagtctgtcaccctctattcaaagtaacaggtttccctttgtcgggt

SEQ ID NO: 23801 - DNA, 50 bp, synthetic construct
  source 1..50: mol_type = other DNA
tggcgaccacatggtcaacaagacggttcccgtaccgacccatcgataca

SEQ ID NO: 23802 - DNA, 50 bp, synthetic construct
  source 1..50: mol_type = other DNA
aacgcaccgagactgtgatcatgctctcctggcacaacctgactggagac

SEQ ID NO: 23803 - DNA, 50 bp, synthetic construct
  source 1..50: mol_type = other DNA
atttcgtgacttacccgatccccgactcttcaatgacttgggatagtttg

SEQ ID NO: 23804 - DNA, 50 bp, synthetic construct
  source 1..50: mol_type = other DNA
gacggttgtgcttgtcacctgcatatcccacactgcggacgggccacggc

SEQ ID NO: 23805 - DNA, 50 bp, synthetic construct
  source 1..50: mol_type = other DNA
cgtcggcgccattatgcatcccccgttcgcaataggcctaaataacccaa

SEQ ID NO: 23806 - DNA, 50 bp, synthetic construct
  source 1..50: mol_type = other DNA
ctccaatgacttgggatagtttgagtcttacggtctattaactacatacc

SEQ ID NO: 23807 - DNA, 50 bp, synthetic construct
  source 1..50: mol_type = other DNA
gaaccgcccgtcaaactgaccccgccagcggagggtttcacattgcctcc

SEQ ID NO: 23808 - DNA, 50 bp, synthetic construct
  source 1..50: mol_type = other DNA
ctcaccttttcggcagcgaattgcctattttcgatggagcccctattgtc

SEQ ID NO: 23809 - DNA, 50 bp, synthetic construct
  source 1..50: mol_type = other DNA
atcccgatcgcaactaaatctaatggcctccatttcgtgacttacccgat

SEQ ID NO: 23810 - DNA, 50 bp, synthetic construct
  source 1..50: mol_type = other DNA
catctcctcgtaacgtacgccctgcttcgtcatggcattcctcgacacct

SEQ ID NO: 23811 - DNA, 50 bp, synthetic construct
  source 1..50: mol_type = other DNA
ctcgagccactttaacatcatagccacttctacggctaatgggcgctacc

SEQ ID NO: 23812 - DNA, 50 bp, synthetic construct
  source 1..50: mol_type = other DNA
gaagccctatttcccagggttgctctcaacccgcgtctcttatccaggtc

SEQ ID NO: 23813 - DNA, 50 bp, synthetic construct
  source 1..50: mol_type = other DNA
tccaaccgagtctaaccaacctttagttagcatctcacatttccattttc

SEQ ID NO: 23814 - DNA, 50 bp, synthetic construct
  source 1..50: mol_type = other DNA
ttatacttcgaaacttaacttcggggccatttgccgccggcattgatatt

SEQ ID NO: 23815 - DNA, 50 bp, synthetic construct
  source 1..50: mol_type = other DNA
tcactcttacggccttattcatcgctcttaattcactcttagaattaccg

SEQ ID NO: 23816 - DNA, 50 bp, synthetic construct; identical to SEQ ID NO: 23232
  source 1..50: mol_type = other DNA

SEQ ID NO: 23817 - DNA, 50 bp, synthetic construct
  source 1..50: mol_type = other DNA
gtttggctgtgtccatctatccttcttctaagattccggtcgccctcttc

SEQ ID NO: 23818 - DNA, 50 bp, synthetic construct; identical to SEQ ID NO: 23186
  source 1..50: mol_type = other DNA

SEQ ID NO: 23819 - DNA, 50 bp, synthetic construct
  source 1..50: mol_type = other DNA
ttagcttgggcctctatcgaccaagaggggctttatcaaaatcctgatcg

SEQ ID NO: 23820 - DNA, 50 bp, synthetic construct
  source 1..50: mol_type = other DNA
tgagaacatcacgaccttaagattgaacgccggcactttggccggcctcc

SEQ ID NO: 23821 - DNA, 50 bp, synthetic construct; identical to SEQ ID NO: 23281
  source 1..50: mol_type = other DNA

SEQ ID NO: 23822 - DNA, 50 bp, synthetic construct
  source 1..50: mol_type = other DNA
ccgccctcagtatttcgccgatcggtccccttgtccgaacttccggaccg

SEQ ID NO: 23823 - DNA, 50 bp, synthetic construct
  source 1..50: mol_type = other DNA
cttcccttgggccacttgactttgtagattcatcggcctccttttctttc

SEQ ID NO: 23824 - DNA, 50 bp, synthetic construct
  source 1..50: mol_type = other DNA
gtatgctcactcttacggccttactcatcgctcttaatacactcttagta

SEQ ID NO: 23825 - DNA, 50 bp, synthetic construct
  source 1..50: mol_type = other DNA
gtgccagacgtcaggccgtcattcccgtacccacgattccaggcacgggc

SEQ ID NO: 23826 - DNA, 50 bp, synthetic construct
  source 1..50: mol_type = other DNA
cctcgacgtttattcgtaactaggcctctagagacttactcctttgagtg

SEQ ID NO: 23827 - DNA, 50 bp, synthetic construct
  source 1..50: mol_type = other DNA
ctttctcgggtttggcctcacgcacgtgaggccccaagcctgacgtaaat

SEQ ID NO: 23828 - DNA, 50 bp, synthetic construct
  source 1..50: mol_type = other DNA
cgcatatcagccttcctcatctgcgctttggttcactagatgggaacccg

SEQ ID NO: 23829 - DNA, 50 bp, synthetic construct
  source 1..50: mol_type = other DNA
accttaggttatcgcggccattagtctgagggctcttttaggcgattcga

SEQ ID NO: 23830 - DNA, 50 bp, synthetic construct
  source 1..50: mol_type = other DNA
caacctttagtaagcctctcacgtttccgtcttccctcgaactgacgctc

SEQ ID NO: 23831 - DNA, 50 bp, synthetic construct
  source 1..50: mol_type = other DNA
cgcctcgctttcgctcagacttgtcccgcgtgttcatgcaccctgatctg

SEQ ID NO: 23832 - DNA, 50 bp, synthetic construct
  source 1..50: mol_type = other DNA
cttgcgtgtaggcaacttttcccaccgctactccacacctatcgcctctt

SEQ ID NO: 23833 - DNA, 50 bp, synthetic construct
  source 1..50: mol_type = other DNA
tcgcatcggcaccatccactcgcgtccccactgtgccttaccctcggccg

SEQ ID NO: 23834 - DNA, 50 bp, synthetic construct
  source 1..50: mol_type = other DNA
actggctatcgcgtatcatgacacttcctttccacttttcctggggccct

SEQ ID NO: 23835 - DNA, 50 bp, synthetic construct
  source 1..50: mol_type = other DNA
cctaaattcaccttttcctacaccttaacgtgtctgttggtcctacaacc

SEQ ID NO: 23836 - DNA, 50 bp, synthetic construct
  source 1..50: mol_type = other DNA
ccacgcctaacacatcgtatccgccctccgaagcttcggcgccgcggtcg

SEQ ID NO: 23837 - DNA, 50 bp, synthetic construct; identical to SEQ ID NO: 23228
  source 1..50: mol_type = other DNA

SEQ ID NO: 23838 - DNA, 50 bp, synthetic construct
  source 1..50: mol_type = other DNA
gcttgcttgcacctactccgatttggcacacgtacactatggaccatccc

SEQ ID NO: 23839 - DNA, 50 bp, synthetic construct
  source 1..50: mol_type = other DNA
gacacggtttaactttctagtgcatatgtcggactgtggacgggccacga

SEQ ID NO: 23840 - DNA, 50 bp, synthetic construct
  source 1..50: mol_type = other DNA
acagaccatccatttaggcgacccgcacttccaactccgtactacccctc

SEQ ID NO: 23841 - DNA, 50 bp, synthetic construct
  source 1..50: mol_type = other DNA
aaacatcttacttggccgctcaatgcaaatgcacgctccaattcaacttc

SEQ ID NO: 23842 - DNA, 50 bp, synthetic construct
  source 1..50: mol_type = other DNA
caaagctgactccgcaacaaccctatgatgggaacacaataccgatgaga

SEQ ID NO: 23843 - DNA, 50 bp, synthetic construct; identical to SEQ ID NO: 23172
  source 1..50: mol_type = other DNA

SEQ ID NO: 23844 - DNA, 50 bp, synthetic construct; identical to SEQ ID NO: 23408
  source 1..50: mol_type = other DNA

SEQ ID NO: 23845 - DNA, 50 bp, synthetic construct
  source 1..50: mol_type = other DNA
cacctactccgatttggcacacgtacactatgaaccatccccaacacaca

SEQ ID NO: 23846 - DNA, 50 bp, synthetic construct; identical to SEQ ID NO: 23271
  source 1..50: mol_type = other DNA

SEQ ID NO: 23847 - DNA, 50 bp, synthetic construct
  source 1..50: mol_type = other DNA
tgtacgaaacccctcgacattcattcggaactaggtctctataggcttac

SEQ ID NO: 23848 - DNA, 50 bp, synthetic construct; identical to SEQ ID NO: 23263
  source 1..50: mol_type = other DNA

SEQ ID NO: 23849 - DNA, 50 bp, synthetic construct
  source 1..50: mol_type = other DNA
tttaacatcatagccacttctacggctaatgggcgctaccctgcttttct

SEQ ID NO: 23850 - DNA, 50 bp, synthetic construct
  source 1..50: mol_type = other DNA
tcgtgccgggaatgcaggccccgatgtgtgcacaatgttaccccccatgt

SEQ ID NO: 23851 - DNA, 50 bp, synthetic construct; identical to SEQ ID NO: 23473
  source 1..50: mol_type = other DNA

SEQ ID NO: 23852 - DNA, 50 bp, synthetic construct
  source 1..50: mol_type = other DNA
cagcccgaatcactaggccaccatggctttccttcccggtagcgagttgc

SEQ ID NO: 23853 - DNA, 50 bp, synthetic construct
  source 1..50: mol_type = other DNA
ggctgaggttctaatctatagggtagcatattgctcattctggggaactt

SEQ ID NO: 23854 - DNA, 50 bp, synthetic construct; identical to SEQ ID NO: 23176
  source 1..50: mol_type = other DNA

SEQ ID NO: 23855 - DNA, 50 bp, synthetic construct
  source 1..50: mol_type = other DNA
tattcattgctattcctcccactctaagggagggcggcattctggttcca

SEQ ID NO: 23856 - DNA, 50 bp, synthetic construct
  source 1..50: mol_type = other DNA
atggattttcaactagcaccgatcgtcataggactcatcccgccccgtgc

SEQ ID NO: 23857 - DNA, 50 bp, synthetic construct
  source 1..50: mol_type = other DNA
cctcctggcttggctattcgcaacttttcgaaggcctacttgactcccac

SEQ ID NO: 23858 - DNA, 50 bp, synthetic construct
  source 1..50: mol_type = other DNA
aggagctttatcgaaatcccgatcggagcataatcagagtacctccatct

SEQ ID NO: 23859 - DNA, 50 bp, synthetic construct
  source 1..50: mol_type = other DNA
ttttcaagatcacatacgattccacgggcatggcgtttggctgtgtccat

SEQ ID NO: 23860 - DNA, 50 bp, synthetic construct
  source 1..50: mol_type = other DNA
ccctcactttctcttggactttggtatacaaatgttcgacaccttggcga

SEQ ID NO: 23861 - DNA, 50 bp, synthetic construct
  source 1..50: mol_type = other DNA
ctcacgttcgaaactgggcttcggggtcacttgccgccggcattgatatt

SEQ ID NO: 23862 - DNA, 50 bp, synthetic construct
  source 1..50: mol_type = other DNA
gttagcttcgtagcttggcttcggggtcatttgccgccggcattgatatt

SEQ ID NO: 23863 - DNA, 50 bp, synthetic construct
  source 1..50: mol_type = other DNA
tgctctgtgctctttggaacacccttactcgcccctggtggggcattccg

SEQ ID NO: 23864 - DNA, 50 bp, synthetic construct
  source 1..50: mol_type = other DNA
ttatggcgtattcgcgtgtctcgacgtaccgagtcacactttttgaggcc

SEQ ID NO: 23865 - DNA, 50 bp, synthetic construct
  source 1..50: mol_type = other DNA
gtttggctgtgtccatccatccttcttctaagattccggttgccctcttc

SEQ ID NO: 23866 - DNA, 50 bp, synthetic construct
  source 1..50: mol_type = other DNA
ccccgacatcagccagggttcccaacccgacaagcgggtaatttcgccgt

SEQ ID NO: 23867 - DNA, 50 bp, synthetic construct
  source 1..50: mol_type = other DNA
cgccttaagcaccacatcgccactttacgaatctatagtgcttcttgagg

SEQ ID NO: 23868 - DNA, 50 bp, synthetic construct
  source 1..50: mol_type = other DNA
cgcagctggccgcgtgcccactcattgcgcataggttggacgggtagtga

SEQ ID NO: 23869 - DNA, 50 bp, synthetic construct
  source 1..50: mol_type = other DNA
gcccattcggactcatatggacagactggctatcgcatgctcatggcact

SEQ ID NO: 23870 - DNA, 50 bp, synthetic construct; identical to SEQ ID NO: 23590
  source 1..50: mol_type = other DNA

SEQ ID NO: 23871 - DNA, 50 bp, synthetic construct
  source 1..50: mol_type = other DNA
gcagtttcgaatgattccctatagtttgaggcttacggtatgtctactac

SEQ ID NO: 23872 - DNA, 50 bp, synthetic construct; identical to SEQ ID NO: 23832
  source 1..50: mol_type = other DNA

SEQ ID NO: 23873 - DNA, 50 bp, synthetic construct
  source 1..50: mol_type = other DNA
aagggattcatcgccgctcgcttgccccttgtcgggtttggtttcacgaa

SEQ ID NO: 23874 - DNA, 50 bp, synthetic construct
  source 1..50: mol_type = other DNA
tgtcgagtgatcagctcctcaaaccgcacctattattagcccgtattcac

SEQ ID NO: 23875 - DNA, 50 bp, synthetic construct
  source 1..50: mol_type = other DNA
gttcccaaggtcccagttcaaacagacgggacccactcagcccaggattc

SEQ ID NO: 23876 - DNA, 50 bp, synthetic construct
  source 1..50: mol_type = other DNA
cgggcagggagtccatttaggccccctgtaacccccactcttgactactc

SEQ ID NO: 23877 - DNA, 50 bp, synthetic construct
  source 1..50: mol_type = other DNA
tcgccgctcgcttgcgccttctcgggtttggtaccacgcacgtggtaccc

SEQ ID NO: 23878 - DNA, 50 bp, synthetic construct; identical to SEQ ID NO: 23819
  source 1..50: mol_type = other DNA

SEQ ID NO: 23879 - DNA, 50 bp, synthetic construct; identical to SEQ ID NO: 23183
  source 1..50: mol_type = other DNA

SEQ ID NO: 23880 - DNA, 50 bp, synthetic construct
  source 1..50: mol_type = other DNA
cagcatcgccttcgtcgccacctaacataagctcactcttacggccttac

SEQ ID NO: 23881 - DNA, 50 bp, synthetic construct
  source 1..50: mol_type = other DNA
agacgtccacttatgtaccggacgttctctccatgggccgcttgactttg

SEQ ID NO: 23882 - DNA, 50 bp, synthetic construct
  source 1..50: mol_type = other DNA
gatgggcatggcgtttggctgtgtccatcagctccgctcatcggagtcca

SEQ ID NO: 23883 - DNA, 50 bp, synthetic construct
  source 1..50: mol_type = other DNA
gcttgggcctctatcgaccaagaggagctttatcgaaatcccgatcggaa

SEQ ID NO: 23884 - DNA, 50 bp, synthetic construct
  source 1..50: mol_type = other DNA
tgcgccccttcactttgtagagtcatgggcatcctcctcttttattatta

SEQ ID NO: 23885 - DNA, 50 bp, synthetic construct; identical to SEQ ID NO: 23567
  source 1..50: mol_type = other DNA

SEQ ID NO: 23886 - DNA, 50 bp, synthetic construct
  source 1..50: mol_type = other DNA
aacgcaccgagactgtgatcatgctctcctggcacaacctgtctggagac

SEQ ID NO: 23887 - DNA, 50 bp, synthetic construct
  source 1..50: mol_type = other DNA
caccccatttccggatggttccgctgctaggcattgaccagactctccta

SEQ ID NO: 23888 - DNA, 50 bp, synthetic construct
  source 1..50: mol_type = other DNA
cttcggatcaccataggactcatcgcgcctcgtgctccttaagacgcact

SEQ ID NO: 23889 - DNA, 50 bp, synthetic construct
  source 1..50: mol_type = other DNA
ccaaggcgcggctgttacatcgccccgagttcgtgcggtggcttctgcgc

SEQ ID NO: 23890 - DNA, 50 bp, synthetic construct
  source 1..50: mol_type = other DNA
tgtcgagtgatcagctcctcaaaccgcacctattattagcccgtattcat

SEQ ID NO: 23891 - DNA, 50 bp, synthetic construct; identical to SEQ ID NO: 23188
  source 1..50: mol_type = other DNA

SEQ ID NO: 23892 - DNA, 50 bp, synthetic construct
  source 1..50: mol_type = other DNA
cataaagtacatgtcctatccaccctctgaccctttatgtccgcagtcga

SEQ ID NO: 23893 - DNA, 50 bp, synthetic construct
  source 1..50: mol_type = other DNA
tgggccgaggcacttccgcctcagcgatcattagcgcctagtcgttgcgg

SEQ ID NO: 23894 - DNA, 50 bp, synthetic construct
  source 1..50: mol_type = other DNA
ccattggtatgagggctcttttaggcgattcgaattgggtacgccgtggg

SEQ ID NO: 23895 - DNA, 50 bp, synthetic construct
  source 1..50: mol_type = other DNA
ctccttcaaaccgtggagctacagccgagtagcgtaggaccccgacttct

SEQ ID NO: 23896 - DNA, 50 bp, synthetic construct
  source 1..50: mol_type = other DNA
gctgcctagctcgtccctgctttcagcctctatcactaggccacggccgc

SEQ ID NO: 23897 - DNA, 50 bp, synthetic construct
  source 1..50: mol_type = other DNA
taaggacgtgggcatatacctcgcttcctcactgcctctgcctatcacac

SEQ ID NO: 23898 - DNA, 50 bp, synthetic construct
  source 1..50: mol_type = other DNA
tctacaactaaggacgtccgtttaggcgtccttctcagcttggactgtca

SEQ ID NO: 23899 - DNA, 50 bp, synthetic construct
  source 1..50: mol_type = other DNA
acatccatattcattgctatttcccccaccctttgggggagcggctttct

SEQ ID NO: 23900 - DNA, 50 bp, synthetic construct
  source 1..50: mol_type = other DNA
taactccatgtcggagtccactacctacacaggacatctcgtgacttttc

SEQ ID NO: 23901 - DNA, 50 bp, synthetic construct; identical to SEQ ID NO: 23227
  source 1..50: mol_type = other DNA

SEQ ID NO: 23902 - DNA, 50 bp, synthetic construct
  source 1..50: mol_type = other DNA
aaataacccaaatttccctcgcatctacctataaattcagtcaacacttt

SEQ ID NO: 23903 - DNA, 50 bp, synthetic construct
  source 1..50: mol_type = other DNA
gacctgggcccgcaaccaactgggcccgcattccctggcttttattcatc

SEQ ID NO: 23904 - DNA, 50 bp, synthetic construct
  source 1..50: mol_type = other DNA
agcaccttagacgacacttagacggccctggtgggccattcggatttatg

SEQ ID NO: 23905 - DNA, 50 bp, synthetic construct
  source 1..50: mol_type = other DNA
gtcacacacgtctgggctttggcccactggataggtacaggtccaacttc

SEQ ID NO: 23906 - DNA, 50 bp, synthetic construct; identical to SEQ ID NO: 23155
  source 1..50: mol_type = other DNA

SEQ ID NO: 23907 - DNA, 50 bp, synthetic construct
  source 1..50: mol_type = other DNA
caaacttttcccgcaattcaacgtatgttacccgggctttggcccactgg

SEQ ID NO: 23908 - DNA, 50 bp, synthetic construct
  source 1..50: mol_type = other DNA
ggatgctcaatgaaaaaggccgttccaattcgtaaaattttacacatcgg

SEQ ID NO: 23909 - DNA, 50 bp, synthetic construct; identical to SEQ ID NO: 23241
  source 1..50: mol_type = other DNA

SEQ ID NO: 23910 - DNA, 50 bp, synthetic construct; identical to SEQ ID NO: 23248
  source 1..50: mol_type = other DNA

SEQ ID NO: 23911 - DNA, 50 bp, synthetic construct
  source 1..50: mol_type = other DNA
aggcttacccctttggaccgtggacaataccccacaatgggaagtcactt

SEQ ID NO: 23912 - DNA, 50 bp, synthetic construct
  source 1..50: mol_type = other DNA
cacactttttgaggccaccatattctacctgggcgcagactaatcgacct

SEQ ID NO: 23913 - DNA, 50 bp, synthetic construct
  source 1..50: mol_type = other DNA
ttacctgcattagtccgagggttcttttaggcgattcgtataagtatttc

SEQ ID NO: 23914 - DNA, 50 bp, synthetic construct
  source 1..50: mol_type = other DNA
aagcacacttagacggtcctggtggaccattcggacttatgatggactac

SEQ ID NO: 23915 - DNA, 50 bp, synthetic construct
  source 1..50: mol_type = other DNA
aaggcaccagttcgtgcgtcgcgcgtagtatccgtttaggcaccacgtac

SEQ ID NO: 23916 - DNA, 50 bp, synthetic construct; identical to SEQ ID NO: 23181
  source 1..50: mol_type = other DNA

SEQ ID NO: 23917 - DNA, 50 bp, synthetic construct
  source 1..50: mol_type = other DNA
caaggactttggcacgcggatgttcgccagcctcgacgaatttcgtcact

SEQ ID NO: 23918 - DNA, 50 bp, synthetic construct
  source 1..50: mol_type = other DNA
agcaccaccaaggaaggaagcccaaccatagcggcgcaccacaaccctcg

SEQ ID NO: 23919 - DNA, 50 bp, synthetic construct
  source 1..50: mol_type = other DNA
agcctgtcttttgccataacatttccaaatcaccttaccttacccttcag

SEQ ID NO: 23920 - DNA, 50 bp, synthetic construct
  source 1..50: mol_type = other DNA
gcaataggcctaaataacccaaatttccctcgcgtctgcccagcaattca

SEQ ID NO: 23921 - DNA, 50 bp, synthetic construct
  source 1..50: mol_type = other DNA
ttcacgcctcgcctattgacgactttcgtagattcatactttgggtgggg

SEQ ID NO: 23922 - DNA, 50 bp, synthetic construct
  source 1..50: mol_type = other DNA
gacgctatacggagcccctcggcggtcgtcccgaaactaggctcctaaag

SEQ ID NO: 23923 - DNA, 50 bp, synthetic construct
  source 1..50: mol_type = other DNA
aaccatcccattaccggatggttccgctactagtcatccccggtactttc

SEQ ID NO: 23924 - DNA, 50 bp, synthetic construct
  source 1..50: mol_type = other DNA
ctcacctttacggtagcgagttgcctattttcaatgggacccctattgtc

SEQ ID NO: 23925 - DNA, 50 bp, synthetic construct
  source 1..50: mol_type = other DNA
tcctggcgtggttattcgcaacttttcgaagacctactcgactcccatcc

SEQ ID NO: 23926 - DNA, 50 bp, synthetic construct
  source 1..50: mol_type = other DNA
ttatcaaggactttggtacacggatgttcgccagcctcgtggaagaacca

SEQ ID NO: 23927 - DNA, 50 bp, synthetic construct; identical to SEQ ID NO: 23865
  source 1..50: mol_type = other DNA

SEQ ID NO: 23928 - DNA, 50 bp, synthetic construct
  source 1..50: mol_type = other DNA
atatcagccgtcaccgtctgcgctttggttcactagatgggaaccggtcc

SEQ ID NO: 23929 - DNA, 50 bp, synthetic construct
  source 1..50: mol_type = other DNA
gttccttgagccgtttaacgagggcacggaagccgtattccctctggggg

SEQ ID NO: 23930 - DNA, 50 bp, synthetic construct; identical to SEQ ID NO: 23194
  source 1..50: mol_type = other DNA

SEQ ID NO: 23931 - DNA, 50 bp, synthetic construct
  source 1..50: mol_type = other DNA
cattttaaggtacctcctggcttggctggaggcaacttttccgccgccta

SEQ ID NO: 23932 - DNA, 50 bp, synthetic construct
  source 1..50: mol_type = other DNA
ccctgcttttctggggcacttggaaatgatgtcgaatcgtaactgaaacc

SEQ ID NO: 23933 - DNA, 50 bp, synthetic construct
  source 1..50: mol_type = other DNA
tgccgcatcagctacgtgtatgccatctttaaggcattggtggcttgaaa

SEQ ID NO: 23934 - DNA, 50 bp, synthetic construct
  source 1..50: mol_type = other DNA
ttgtgtccagagacgatttagctttctacttcatatccccgactgtggac

SEQ ID NO: 23935 - DNA, 50 bp, synthetic construct
  source 1..50: mol_type = other DNA
gagccgttttaccggggcattgaagccctcttccccgcgaccgaaattca

SEQ ID NO: 23936 - DNA, 50 bp, synthetic construct
  source 1..50: mol_type = other DNA
taacggcccatagattcagacctagcctattcacgactttcgtagattca

SEQ ID NO: 23937 - DNA, 50 bp, synthetic construct
  source 1..50: mol_type = other DNA
tcacgtacattagtacgacggttcttttaggcgatttgatttaggacatc

SEQ ID NO: 23938 - DNA, 50 bp, synthetic construct
  source 1..50: mol_type = other DNA
ctctatgctgcatatgcccgactgtggacgggtcacggccttccaattcc

SEQ ID NO: 23939 - DNA, 50 bp, synthetic construct
  source 1..50: mol_type = other DNA
aattcaccttttcctacaccctaaagcttctgttgatcctacaaccgagt

SEQ ID NO: 23940 - DNA, 50 bp, synthetic construct
  source 1..50: mol_type = other DNA
agtatagctgcctccccaaaccgtggagctacagccgagcagtgtaggac

SEQ ID NO: 23941 - DNA, 50 bp, synthetic construct
  source 1..50: mol_type = other DNA
ttacctacttgcccacctataagggcatggctggtacctggccgttttgg

SEQ ID NO: 23942 - DNA, 50 bp, synthetic construct
  source 1..50: mol_type = other DNA
cccctggtgggaggttcggatttatgatgggttactggctatcgcatttc

SEQ ID NO: 23943 - DNA, 50 bp, synthetic construct
  source 1..50: mol_type = other DNA
atcgcatccattagtatgaaggatcttttaggcgatttgaattaggtacg

SEQ ID NO: 23944 - DNA, 50 bp, synthetic construct
  source 1..50: mol_type = other DNA
agccaatgactttaagattgtatcgagacactttggtctcctacctgtca

SEQ ID NO: 23945 - DNA, 50 bp, synthetic construct
  source 1..50: mol_type = other DNA
tactagccatcccctcgtaaggtcagccgcagcttccgcatggcgctcca

SEQ ID NO: 23946 - DNA, 50 bp, synthetic construct
  source 1..50: mol_type = other DNA
gactgtggacgggccacgaccttccaattctcctctcgagtagcgttctc

SEQ ID NO: 23947 - DNA, 50 bp, synthetic construct
  source 1..50: mol_type = other DNA
cataatgtacatgtcctatccaccctctgacccttcggttccgcagtcga

SEQ ID NO: 23948 - DNA, 50 bp, synthetic construct
  source 1..50: mol_type = other DNA
agaccagggtcactgtcgatcctacaaccgaaccttcgtcggtaagtaag

SEQ ID NO: 23949 - DNA, 50 bp, synthetic construct
  source 1..50: mol_type = other DNA
aattcaccttttgctacacttctatgcatctgttggtcctacaaccgagt

SEQ ID NO: 23950 - DNA, 50 bp, synthetic construct
  source 1..50: mol_type = other DNA
accccaccagcggaggttttcgcattgcctccgaagatttccacgggagt

SEQ ID NO: 23951 - DNA, 50 bp, synthetic construct
  source 1..50: mol_type = other DNA
gtgtacgttcagcttgcccttaatgaaataactttgaagccagctaaatt

SEQ ID NO: 23952 - DNA, 50 bp, synthetic construct
  source 1..50: mol_type = other DNA
cgattagggatttcggagagagtcaagcctaacctcagacgttgggctga

SEQ ID NO: 23953 - DNA, 50 bp, synthetic construct
  source 1..50: mol_type = other DNA
tcttttcggcgataacaagtatggtatgggcatggcatttggctgtgtcc

SEQ ID NO: 23954 - DNA, 50 bp, synthetic construct; identical to SEQ ID NO: 23275
  source 1..50: mol_type = other DNA

SEQ ID NO: 23955 - DNA, 50 bp, synthetic construct; identical to SEQ ID NO: 23178
  source 1..50: mol_type = other DNA

SEQ ID NO: 23956 - DNA, 50 bp, synthetic construct
  source 1..50: mol_type = other DNA
ccatgggcatggcatttgcctgtgtgcatcagcccaacttatatgagtcc

SEQ ID NO: 23957 - DNA, 50 bp, synthetic construct; identical to SEQ ID NO: 23548
  source 1..50: mol_type = other DNA

SEQ ID NO: 23958 - DNA, 50 bp, synthetic construct
  source 1..50: mol_type = other DNA
tacaaccgaatcttcgtcggtgagtaattttctcacgcattatcgagtga

SEQ ID NO: 23959 - DNA, 50 bp, synthetic construct
  source 1..50: mol_type = other DNA
tagtagccatcccctcgtaaggtgagccgcaacttccgccccgcactcgg

SEQ ID NO: 23960 - DNA, 50 bp, synthetic construct
  source 1..50: mol_type = other DNA
tgaccccaccagcggaggttttcacattgcctccgaagatttccacggga

SEQ ID NO: 23961 - DNA, 50 bp, synthetic construct
  source 1..50: mol_type = other DNA
cccagtcagcccaggattcagattcggcttgccgctaccgctaccgtctc

SEQ ID NO: 23962 - DNA, 50 bp, synthetic construct
  source 1..50: mol_type = other DNA
ctcctctcttaggattctgctcgccctcttgggaacaattccttgagccg

SEQ ID NO: 23963 - DNA, 50 bp, synthetic construct
  source 1..50: mol_type = other DNA
acccctccccccccctttccaccggcgcctccccttcccccccccccctc

SEQ ID NO: 23964 - DNA, 50 bp, synthetic construct
  source 1..50: mol_type = other DNA
acaactttatgctgggaagtaaacaaacctaagattgggcacatataccc

SEQ ID NO: 23965 - DNA, 50 bp, synthetic construct
  source 1..50: mol_type = other DNA
acaactttatgccgggaaactaataaactcaagattgggcgactacgccc

SEQ ID NO: 23966 - DNA, 50 bp, synthetic construct; identical to SEQ ID NO: 23692
  source 1..50: mol_type = other DNA

SEQ ID NO: 23967 - DNA, 50 bp, synthetic construct
  source 1..50: mol_type = other DNA
tcgtccatgctttcatcccgaatcactaggccaccataattcacccttac

SEQ ID NO: 23968 - DNA, 50 bp, synthetic construct
  source 1..50: mol_type = other DNA
taccccgctgcacctctgcctcgtcactttggtggcgccccgctgccttc

SEQ ID NO: 23969 - DNA, 50 bp, synthetic construct
  source 1..50: mol_type = other DNA
tgctctctgagccactttaaaatcatggacacttctacgtccaatgggcg

SEQ ID NO: 23970 - DNA, 50 bp, synthetic construct
  source 1..50: mol_type = other DNA
gacacaaatgttcgacaccttctcgtaataatcgagttggcgcatgaaaa

SEQ ID NO: 23971 - DNA, 50 bp, synthetic construct
  source 1..50: mol_type = other DNA
tccggctgtccgcatcagcttacctacttgcccaactataagggcatggc

SEQ ID NO: 23972 - DNA, 50 bp, synthetic construct
  source 1..50: mol_type = other DNA
tactccatatgattccgcgggcatggcgtttggctgtgtccatctactcc

SEQ ID NO: 23973 - DNA, 50 bp, synthetic construct
  source 1..50: mol_type = other DNA
actttgggacacccttcgtcctccctggtgggaggttccgatttatgatg

SEQ ID NO: 23974 - DNA, 50 bp, synthetic construct
  source 1..50: mol_type = other DNA
atatggagctacctctctgcttccttgcattcacggcggtggactgcctt

SEQ ID NO: 23975 - DNA, 50 bp, synthetic construct
  source 1..50: mol_type = other DNA
ttgtaacttaaacccattaactacacatcctatccggcctctgaaacttc

SEQ ID NO: 23976 - DNA, 50 bp, synthetic construct
  source 1..50: mol_type = other DNA
gggagttctactctaaagggtattgcaagtcaatcattctcgggactctc

SEQ ID NO: 23977 - DNA, 50 bp, synthetic construct
  source 1..50: mol_type = other DNA
ccttcgcaacactctgcacttcgcctggttatgattagcgagctcctgaa

SEQ ID NO: 23978 - DNA, 50 bp, synthetic construct
  source 1..50: mol_type = other DNA
ttccatcgctttaaggaacagcccattcaaggctggacgtgctttccgca

SEQ ID NO: 23979 - DNA, 50 bp, synthetic construct
  source 1..50: mol_type = other DNA
tcacattaccgtattcccgcgaactgaccctctgtatgttcagctagtcc

SEQ ID NO: 23980 - DNA, 50 bp, synthetic construct
  source 1..50: mol_type = other DNA
tgtcgggtctgggtgtcgattccagggattatgtacgattcaccttttgc

SEQ ID NO: 23981 - DNA, 50 bp, synthetic construct
  source 1..50: mol_type = other DNA
gccatacatttccagatagtcgttccttcttctctctgctatgaactgat

SEQ ID NO: 23982 - DNA, 50 bp, synthetic construct
  source 1..50: mol_type = other DNA
gcacgcggccgaggctgcccggccggccgtcaacgtcttttggtacacag

SEQ ID NO: 23983 - DNA, 50 bp, synthetic construct
  source 1..50: mol_type = other DNA
ctttggccctcgccgttccgccctaggtctcatggtgctctgtgctcttt

SEQ ID NO: 23984 - DNA, 50 bp, synthetic construct
  source 1..50: mol_type = other DNA
taagtatcagatcaacctccatttgcgacacttgactttgtagagtaatc

SEQ ID NO: 23985 - DNA, 50 bp, synthetic construct
  source 1..50: mol_type = other DNA
cgggtctagcagcagattccaggggttcgcgcacgattcaccctttccta

SEQ ID NO: 23986 - DNA, 50 bp, synthetic construct
  source 1..50: mol_type = other DNA
ttttgctgttctcgactcgctcaaggtctcatgccggtctgtgcactttg

SEQ ID NO: 23987 - DNA, 50 bp, synthetic construct
  source 1..50: mol_type = other DNA
gcttcgccacttaagttcggggccatttgccgccaccattgatattggta

SEQ ID NO: 23988 - DNA, 50 bp, synthetic construct
  source 1..50: mol_type = other DNA
tcgtagattcgcccttcgggcggggctctgctctgccggtaaggcacgcc

SEQ ID NO: 23989 - DNA, 50 bp, synthetic construct
  source 1..50: mol_type = other DNA
tctcacatttccatattccctcgaactgacgctctgtctgttcagctcgt

SEQ ID NO: 23990 - DNA, 50 bp, synthetic construct
  source 1..50: mol_type = other DNA
catcgcttcgtgtactactgccgaaggtccttttcgaagaccgttacgta

SEQ ID NO: 23991 - DNA, 50 bp, synthetic construct
  source 1..50: mol_type = other DNA
acatccatattcattgctatttcgtccactctttggacgagcggcgttct

SEQ ID NO: 23992 - DNA, 50 bp, synthetic construct
  source 1..50: mol_type = other DNA
ctagtctggtttggcgcacgcgcactatgggcagcccccaacgcacgcgc

SEQ ID NO: 23993 - DNA, 50 bp, synthetic construct; identical to SEQ ID NO: 23192
  source 1..50: mol_type = other DNA

SEQ ID NO: 23994 - DNA, 50 bp, synthetic construct
  source 1..50: mol_type = other DNA
cagcccattcaaggctgggcgtgctttccgcattactaaacccgtgacag

SEQ ID NO: 23995 - DNA, 50 bp, synthetic construct
  source 1..50: mol_type = other DNA
tgacatcggattataacccaaagccacaacgtacgtgtcctatctaccct

SEQ ID NO: 23996 - DNA, 50 bp, synthetic construct
  source 1..50: mol_type = other DNA
tggtggctttcaaaattcgtctccctgtgagactttcccgtactgggccc

SEQ ID NO: 23997 - DNA, 50 bp, synthetic construct
  source 1..50: mol_type = other DNA
tgtcttgacacccctgtgcacgtctctcgccttcggcccttaccctaggg

SEQ ID NO: 23998 - DNA, 50 bp, synthetic construct
  source 1..50: mol_type = other DNA
cgtgcgtcggtcagcgtatccgtttaggcacgccgcacataccgctccac

SEQ ID NO: 23999 - DNA, 50 bp, synthetic construct; identical to SEQ ID NO: 23225
  source 1..50: mol_type = other DNA

SEQ ID NO: 24000 - DNA, 50 bp, synthetic construct
  source 1..50: mol_type = other DNA
cgtaccgtacgtaccgctccacactactaccctcggcaataccaagctat

SEQ ID NO: 24001 - DNA, 50 bp, synthetic construct
  source 1..50: mol_type = other DNA
ggccttccagttctcctccccacgttcgaggcttaacttcggggccactt

SEQ ID NO: 24002 - DNA, 50 bp, synthetic construct
  source 1..50: mol_type = other DNA
tcacgcgcattcgtacgacggctcttttaggcgatttgaattaggacgtc

SEQ ID NO: 24003 - DNA, 50 bp, synthetic construct
  source 1..50: mol_type = other DNA
gattttgtataatggcttcgacacctatggaaatatccataccatcctct

SEQ ID NO: 24004 - DNA, 50 bp, synthetic construct
  source 1..50: mol_type = other DNA
cactaggatacgacggctcttttcggagctgcactcccgtactgcgcggg

SEQ ID NO: 24005 - DNA, 50 bp, synthetic construct
  source 1..50: mol_type = other DNA
cctcccctcactttctcaaggactttggcacgcggatgttaggcagcctc

SEQ ID NO: 24006 - DNA, 50 bp, synthetic construct
  source 1..50: mol_type = other DNA
atcttcgtcgataagtaagtttctcacgcattatcgagtgatcagctcac

SEQ ID NO: 24007 - DNA, 50 bp, synthetic construct; identical to SEQ ID NO: 23204
  source 1..50: mol_type = other DNA

SEQ ID NO: 24008 - DNA, 50 bp, synthetic construct
  source 1..50: mol_type = other DNA
ggctatcgcgtatcatggcactccctttccacttttcttggggccctccc

SEQ ID NO: 24009 - DNA, 50 bp, synthetic construct
  source 1..50: mol_type = other DNA
gcgcccgcttcctttaaactctcctagacgaggatcatgctctcctggtc

SEQ ID NO: 24010 - DNA, 50 bp, synthetic construct
  source 1..50: mol_type = other DNA
cgttttcgatcggattgacgctcccactgccgggctcgtcattgctttca

SEQ ID NO: 24011 - DNA, 50 bp, synthetic construct
  source 1..50: mol_type = other DNA
gagacccattcagagagagttaaagtcaaaatttaatgcaccgataatgt

SEQ ID NO: 24012 - DNA, 50 bp, synthetic construct
  source 1..50: mol_type = other DNA
ttctactcataagggtggagtgtactcccattcagagggccatctggtgg

SEQ ID NO: 24013 - DNA, 50 bp, synthetic construct; identical to SEQ ID NO: 23266
  source 1..50: mol_type = other DNA

SEQ ID NO: 24014 - DNA, 50 bp, synthetic construct
  source 1..50: mol_type = other DNA
accgtcttgtccaattataaggacatgatggatattctcactacacctct

SEQ ID NO: 24015 - DNA, 50 bp, synthetic construct
  source 1..50: mol_type = other DNA
ccagcggaggctttctcattgcctccgcgggtttccatgggagtcttacc

SEQ ID NO: 24016 - DNA, 50 bp, synthetic construct
  source 1..50: mol_type = other DNA
atgatgaaatacctcgctacacctctgcctcttcactgtcaggacggtag

SEQ ID NO: 24017 - DNA, 50 bp, synthetic construct; identical to SEQ ID NO: 23264
  source 1..50: mol_type = other DNA

SEQ ID NO: 24018 - DNA, 50 bp, synthetic construct; identical to SEQ ID NO: 23162
  source 1..50: mol_type = other DNA

SEQ ID NO: 24019 - DNA, 50 bp, synthetic construct
  source 1..50: mol_type = other DNA
agggccccatgacttatgttagtttgacgcttacagtaattcctacaggc

SEQ ID NO: 24020 - DNA, 50 bp, synthetic construct; identical to SEQ ID NO: 23262
  source 1..50: mol_type = other DNA

SEQ ID NO: 24021 - DNA, 50 bp, synthetic construct; identical to SEQ ID NO: 23270
  source 1..50: mol_type = other DNA

SEQ ID NO: 24022 - DNA, 50 bp, synthetic construct
  source 1..50: mol_type = other DNA
ccgccaccctgttacggtccgcccctcaaactgaccccgccagcggaggc

SEQ ID NO: 24023 - DNA, 50 bp, synthetic construct
  source 1..50: mol_type = other DNA
tctgtcacagactgcccgtcaaactgaccccgccagcggaggattttcca

SEQ ID NO: 24024 - DNA, 50 bp, synthetic construct
  source 1..50: mol_type = other DNA
cgtcactccgacaacacatcacttcatgcgtgttgccttccgacccgaca

SEQ ID NO: 24025 - DNA, 50 bp, synthetic construct
  source 1..50: mol_type = other DNA
tattctggtgtcgtggcgtaccacgtccccatttttgaggccaccatact

SEQ ID NO: 24026 - DNA, 50 bp, synthetic construct
  source 1..50: mol_type = other DNA
ggaagcccaacatttggagaaaacaaaccctcgttcggaagcccactcac

SEQ ID NO: 24027 - DNA, 50 bp, synthetic construct; identical to SEQ ID NO: 23154
  source 1..50: mol_type = other DNA

SEQ ID NO: 24028 - DNA, 50 bp, synthetic construct
  source 1..50: mol_type = other DNA
cgtgttcggtcggactgacgctctgactgttcagctcgtccttgctttca

SEQ ID NO: 24029 - DNA, 50 bp, synthetic construct
  source 1..50: mol_type = other DNA
ttgtcaaggactttggcacgcgggtgtttggcagcctcggagggaccacc

SEQ ID NO: 24030 - DNA, 50 bp, synthetic construct
  source 1..50: mol_type = other DNA
ccagtatgtacatgtcctatccaccctctgtttctctgcacgtgcggtca

SEQ ID NO: 24031 - DNA, 50 bp, synthetic construct
  source 1..50: mol_type = other DNA
cgtatgcaggactccctctttcaccccctagaagcctggagtgcgatagt

SEQ ID NO: 24032 - DNA, 50 bp, synthetic construct
  source 1..50: mol_type = other DNA
gattatgggttactgcagagatcttctgtagactttctctaatttctaaa

SEQ ID NO: 24033 - DNA, 50 bp, synthetic construct
  source 1..50: mol_type = other DNA
ggtgattcggaagcccaaacaaccacacacacccagaaccccggggccac

SEQ ID NO: 24034 - DNA, 50 bp, synthetic construct
  source 1..50: mol_type = other DNA
aaataaccttcttttttttttttttttttttttttttttaaccttttcat

SEQ ID NO: 24035 - DNA, 50 bp, synthetic construct
  source 1..50: mol_type = other DNA
aggctatggcggctcgttggcctacgtcactgtgtcttcctatccgtctc

SEQ ID NO: 24036 - DNA, 50 bp, synthetic construct; identical to SEQ ID NO: 23143
  source 1..50: mol_type = other DNA

SEQ ID NO: 24037 - DNA, 50 bp, synthetic construct; identical to SEQ ID NO: 23265
  source 1..50: mol_type = other DNA

SEQ ID NO: 24038 - DNA, 50 bp, synthetic construct
  source 1..50: mol_type = other DNA
cgcaccacaactccctcgcacacaggcccaggaccgcccgggccggcctc

SEQ ID NO: 24039 - DNA, 50 bp, synthetic construct
  source 1..50: mol_type = other DNA
taactgaggcattgaagccttattcctcacgagctttctcggcgtctctt

SEQ ID NO: 24040 - DNA, 50 bp, synthetic construct
  source 1..50: mol_type = other DNA
gcgtctcttagccaggtccgttgacaaattgtttttgtgtcccgacacgg

SEQ ID NO: 24041 - DNA, 50 bp, synthetic construct
  source 1..50: mol_type = other DNA
cgccgaatgacctgtcattgactgcaactccgagctttcgcacccctcgt

SEQ ID NO: 24042 - DNA, 50 bp, synthetic construct
  source 1..50: mol_type = other DNA
aggcaccagttcgtgcgtcgggcagggtatccgtttaggcaccctgcgta

SEQ ID NO: 24043 - DNA, 50 bp, synthetic construct
  source 1..50: mol_type = other DNA
gacgcctccctgcgtccctccatcgagttggggtcgctaccaacagaccc

SEQ ID NO: 24044 - DNA, 50 bp, synthetic construct
  source 1..50: mol_type = other DNA
ccaagcaggcgaggtccagtcagccctcgattccactccggattgccgca

SEQ ID NO: 24045 - DNA, 50 bp, synthetic construct
  source 1..50: mol_type = other DNA
catcttgccaggccgctcaatgcggccgaccgttccaattccgatttccg

SEQ ID NO: 24046 - DNA, 50 bp, synthetic construct
  source 1..50: mol_type = other DNA
gccgagtggtaccgctgctagtcatcggcctgactctccaacttgccggt

SEQ ID NO: 24047 - DNA, 50 bp, synthetic construct
  source 1..50: mol_type = other DNA
gagtcatggacgtccttccctatgaggcactcatcaccgctcgctttcgc

SEQ ID NO: 24048 - DNA, 50 bp, synthetic construct
  source 1..50: mol_type = other DNA
ctggttcccaaggccccggtgcaagcagcaggggcccactcagcccagga

SEQ ID NO: 24049 - DNA, 50 bp, synthetic construct
  source 1..50: mol_type = other DNA
tgtgccaggtctgaggatgccctccgtcgtcaccccttagaaggcgttac

SEQ ID NO: 24050 - DNA, 50 bp, synthetic construct; identical to SEQ ID NO: 23236
  source 1..50: mol_type = other DNA

SEQ ID NO: 24051 - DNA, 50 bp, synthetic construct
  source 1..50: mol_type = other DNA
aatcgatctaccatcccatttccggatggtaccgctactacccattgccc

SEQ ID NO: 24052 - DNA, 50 bp, synthetic construct
  source 1..50: mol_type = other DNA
caccttcacaccgttgtgtacctcgactgacaatgattagcccactcccg

SEQ ID NO: 24053 - DNA, 50 bp, synthetic construct
  source 1..50: mol_type = other DNA
gcacctcctggcttgggtggacccaacttttggccccctactgaacccca

SEQ ID NO: 24054 - DNA, 50 bp, synthetic construct
  source 1..50: mol_type = other DNA
cccaaggtcccgatccaaataggcgggacccaatcagcccaggattccgc

SEQ ID NO: 24055 - DNA, 50 bp, synthetic construct; identical to SEQ ID NO: 23180
  source 1..50: mol_type = other DNA

SEQ ID NO: 24056 - DNA, 50 bp, synthetic construct
  source 1..50: mol_type = other DNA
tttggccgagggttcttttgggcgattcgtataaagacacaatgggcatg

SEQ ID NO: 24057 - DNA, 50 bp, synthetic construct
  source 1..50: mol_type = other DNA
ccacttctacggccaatgggcgctgttctgcctttctggggtacctcgaa

SEQ ID NO: 24058 - DNA, 50 bp, synthetic construct
  source 1..50: mol_type = other DNA
tgcttctgccgggatacccaacatttgacgaagatattcccttatttcaa

SEQ ID NO: 24059 - DNA, 50 bp, synthetic construct
  source 1..50: mol_type = other DNA
cctcactcttacgtctgtactcatcgctctccgcccacgcttagggcggg

SEQ ID NO: 24060 - DNA, 50 bp, synthetic construct
  source 1..50: mol_type = other DNA
ctcagctagtaccgtccgtttaggtggtactctaggcttggactatcata

SEQ ID NO: 24061 - DNA, 50 bp, synthetic construct
  source 1..50: mol_type = other DNA
ctttgggacacaaatgtttgacagcctcccgaaatatacgggctgccgca

SEQ ID NO: 24062 - DNA, 50 bp, synthetic construct
  source 1..50: mol_type = other DNA
acgccggggctcggcgacttctggggtacgtcttgtgcaccagctatccg

SEQ ID NO: 24063 - DNA, 50 bp, synthetic construct; identical to SEQ ID NO: 23151
  source 1..50: mol_type = other DNA

SEQ ID NO: 24064 - DNA, 50 bp, synthetic construct
  source 1..50: mol_type = other DNA
tcggagcctacttggagtgcggcacatctcgtgacggttccgagcccccg

SEQ ID NO: 24065 - DNA, 50 bp, synthetic construct
  source 1..50: mol_type = other DNA
gcaccagcccatcttgtatgattccgcaactctctaagaaccaattcctt

SEQ ID NO: 24066 - DNA, 50 bp, synthetic construct; identical to SEQ ID NO: 23438
  source 1..50: mol_type = other DNA

SEQ ID NO: 24067 - DNA, 50 bp, synthetic construct
  source 1..50: mol_type = other DNA
ctacaactaacacggtccgtttaggccacgttctcagcttggactgtcat

SEQ ID NO: 24068 - DNA, 50 bp, synthetic construct
  source 1..50: mol_type = other DNA
agcctgtcgcgtgccataccttccatagatcgtcttaccgtacccttccg

SEQ ID NO: 24069 - DNA, 50 bp, synthetic construct; identical to SEQ ID NO: 23173
  source 1..50: mol_type = other DNA

SEQ ID NO: 24070 - DNA, 50 bp, synthetic construct
  source 1..50: mol_type = other DNA
cttctcacatccactactctccaggtccgtttaggcctgaaactcggctt

SEQ ID NO: 24071 - DNA, 50 bp, synthetic construct; identical to SEQ ID NO: 23226
  source 1..50: mol_type = other DNA

SEQ ID NO: 24072 - DNA, 50 bp, synthetic construct
  source 1..50: mol_type = other DNA
agacctttctggccggtctctcccactctcggggcatccgctttgccttt

SEQ ID NO: 24073 - DNA, 50 bp, synthetic construct
  source 1..50: mol_type = other DNA
cgcctccctgcgtccctccatcgagtaggggccgctaccaacaggccccg

SEQ ID NO: 24074 - DNA, 50 bp, synthetic construct
  source 1..50: mol_type = other DNA
gggcgggccgctttaacatcatggccacttctacggccaatgggcgctgt

SEQ ID NO: 24075 - DNA, 50 bp, synthetic construct
  source 1..50: mol_type = other DNA
cattcacctcgctaggtaagtcgttcacacatgattatctagctcccgaa

SEQ ID NO: 24076 - DNA, 50 bp, synthetic construct
  source 1..50: mol_type = other DNA
tccacccgtccctctcatagggctccactcgctctcttgacaacggttcc

SEQ ID NO: 24077 - DNA, 50 bp, synthetic construct
  source 1..50: mol_type = other DNA
gtgtcctatctaccctgagaccctttggttccgaaaccgaaaccgcctct

SEQ ID NO: 24078 - DNA, 50 bp, synthetic construct
  source 1..50: mol_type = other DNA
ctttagagcacacttagacggtcctggtggaccattcggacttatgagga

SEQ ID NO: 24079 - DNA, 50 bp, synthetic construct
  source 1..50: mol_type = other DNA
agtatagctgcctcaccaaaccgtggagctacagccgagcagtgtaggac

SEQ ID NO: 24080 - DNA, 50 bp, synthetic construct; identical to SEQ ID NO: 23527
  source 1..50: mol_type = other DNA

SEQ ID NO: 24081 - DNA, 50 bp, synthetic construct
  source 1..50: mol_type = other DNA
atggaacccctcactgcacctctgcctcagcaccgtcacggcggtagact

SEQ ID NO: 24082 - DNA, 50 bp, synthetic construct
  source 1..50: mol_type = other DNA
actccgcttggcctaacttacggcccggcgtctcccactaccggggcatc

SEQ ID NO: 24083 - DNA, 50 bp, synthetic construct; identical to SEQ ID NO: 23218
  source 1..50: mol_type = other DNA

SEQ ID NO: 24084 - DNA, 50 bp, synthetic construct
  source 1..50: mol_type = other DNA
tctaattatgttctaccgtagtactcaggcgtacaagtgtactaatttcc

SEQ ID NO: 24085 - DNA, 50 bp, synthetic construct
  source 1..50: mol_type = other DNA
tgacccacatttcccttcgaattccgccctagaattcagtccacactttt

SEQ ID NO: 24086 - DNA, 50 bp, synthetic construct; identical to SEQ ID NO: 23925
  source 1..50: mol_type = other DNA

SEQ ID NO: 24087 - DNA, 50 bp, synthetic construct
  source 1..50: mol_type = other DNA
acgacacttagacggccctggtgggccattcggatttatgagtcacactg

SEQ ID NO: 24088 - DNA, 50 bp, synthetic construct
  source 1..50: mol_type = other DNA
ccatcccctcgtatgagtgccgcagcttaccacatgcattcaataggacc

SEQ ID NO: 24089 - DNA, 50 bp, synthetic construct
  source 1..50: mol_type = other DNA
aacacccatcgcctctttaaggtttgcttgaacctctatcgaccaagaga

SEQ ID NO: 24090 - DNA, 50 bp, synthetic construct
  source 1..50: mol_type = other DNA
gccctcttcccaacaattccttgagccgttttaatggggcattgaagccc

SEQ ID NO: 24091 - DNA, 50 bp, synthetic construct
  source 1..50: mol_type = other DNA
ttgtagccatcccctcgtaaggtgaggcgcagcttccaccccgcactcgg

SEQ ID NO: 24092 - DNA, 50 bp, synthetic construct; identical to SEQ ID NO: 23156
  source 1..50: mol_type = other DNA

SEQ ID NO: 24093 - DNA, 50 bp, synthetic construct
  source 1..50: mol_type = other DNA
ggcgtaccacgactcccttttcctaaataagcgaagtcctacctgagcgc

SEQ ID NO: 24094 - DNA, 50 bp, synthetic construct
  source 1..50: mol_type = other DNA
acctacggaaccgtgattctcggcttctttctgcactattcgacgctatt

SEQ ID NO: 24095 - DNA, 50 bp, synthetic construct
  source 1..50: mol_type = other DNA
ctctctcttacggccgtactcatcgctctcgtttcactcttagaaacggc

SEQ ID NO: 24096 - DNA, 50 bp, synthetic construct
  source 1..50: mol_type = other DNA
gtccccaacgcgcacgccccaacacccaaaaaagaactagccagacggcc

SEQ ID NO: 24097 - DNA, 50 bp, synthetic construct
  source 1..50: mol_type = other DNA
tcgtcagtctgatacactctattcagagtatcagttttccctttgtcggg

SEQ ID NO: 24098 - DNA, 50 bp, synthetic construct
  source 1..50: mol_type = other DNA
tgtgaccttgactctgtgccaggtctgaggatgccctccgtcgtcacccc

SEQ ID NO: 24099 - DNA, 50 bp, synthetic construct
  source 1..50: mol_type = other DNA
gaagccctattccccacggacgctctcgtccggcgtctcttatcagtgtt

SEQ ID NO: 24100 - DNA, 50 bp, synthetic construct
  source 1..50: mol_type = other DNA
agctgggctttggcccactggatgggtacaggtccaacttcacctccatt

SEQ ID NO: 24101 - DNA, 50 bp, synthetic construct
  source 1..50: mol_type = other DNA
ccactcattgcgcataggttggacgggaagtgaacccctattggaacgct

SEQ ID NO: 24102 - DNA, 50 bp, synthetic construct
  source 1..50: mol_type = other DNA
gcgtctcccactcccggggcatggacttgcgcgtaccagacggctagcgc

SEQ ID NO: 24103 - DNA, 50 bp, synthetic construct
  source 1..50: mol_type = other DNA
gttattcgcaacttttcgaagacctactcggctcacatcctcactttccg

SEQ ID NO: 24104 - DNA, 50 bp, synthetic construct
  source 1..50: mol_type = other DNA
tttcgtgacttaaccgatccccggctctccaatgacttggaatagtttga

SEQ ID NO: 24105 - DNA, 50 bp, synthetic construct
  source 1..50: mol_type = other DNA
cttgactctctaccaaaaaccctaagcgaagtgcagtggcacaacgtcgg

SEQ ID NO: 24106 - DNA, 50 bp, synthetic construct
  source 1..50: mol_type = other DNA
cgtcggtaagtaagtttctcacgcattgtcgagtgatcagctctctggcc

SEQ ID NO: 24107 - DNA, 50 bp, synthetic construct
  source 1..50: mol_type = other DNA
tgacgctctcgctgtcaagctcgtcattgctttcaacctcaatcactagg

SEQ ID NO: 24108 - DNA, 50 bp, synthetic construct
  source 1..50: mol_type = other DNA
catcagccagggttcccaacccgacaagcgggtaatttcgccatgcgctc

SEQ ID NO: 24109 - DNA, 50 bp, synthetic construct
  source 1..50: mol_type = other DNA
caggcgaggttcaatcagccctcgattccactccggctttccgcatcggc

SEQ ID NO: 24110 - DNA, 50 bp, synthetic construct; identical to SEQ ID NO: 23274
  source 1..50: mol_type = other DNA

SEQ ID NO: 24111 - DNA, 50 bp, synthetic construct
  source 1..50: mol_type = other DNA
tacgactaacgcggtccgtttaggccacgttctcagcttggactgtcata

SEQ ID NO: 24112 - DNA, 50 bp, synthetic construct
  source 1..50: mol_type = other DNA
cttctgtagcctcttcttgaaagacctttctttctggtatctcgtactgt

SEQ ID NO: 24113 - DNA, 50 bp, synthetic construct; identical to SEQ ID NO: 23256
  source 1..50: mol_type = other DNA

SEQ ID NO: 24114 - DNA, 50 bp, synthetic construct; identical to SEQ ID NO: 23147
  source 1..50: mol_type = other DNA

SEQ ID NO: 24115 - DNA, 50 bp, synthetic construct
  source 1..50: mol_type = other DNA
agcctcatttggttatcacacccattaggacgaaggttcttttacgagat

SEQ ID NO: 24116 - DNA, 50 bp, synthetic construct
  source 1..50: mol_type = other DNA
tgtgccgggtttgaggatgccctccgtcgtcactccttataaccagttac

SEQ ID NO: 24117 - DNA, 50 bp, synthetic construct; identical to SEQ ID NO: 23931
  source 1..50: mol_type = other DNA

SEQ ID NO: 24118 - DNA, 50 bp, synthetic construct
  source 1..50: mol_type = other DNA
tcttttcggcgatagcaaacggtacgcgggcatggcatttggctgtgtcc

SEQ ID NO: 24119 - DNA, 50 bp, synthetic construct; identical to SEQ ID NO: 23828
  source 1..50: mol_type = other DNA

SEQ ID NO: 24120 - DNA, 50 bp, synthetic construct
  source 1..50: mol_type = other DNA
taaactcaatggtttcttgaactatcagcttcctaaacccttttaggcgg

SEQ ID NO: 24121 - DNA, 50 bp, synthetic construct
  source 1..50: mol_type = other DNA
atcctcactttccggttagtttgagcctctatcgagcatgaggggctttc

SEQ ID NO: 24122 - DNA, 50 bp, synthetic construct
  source 1..50: mol_type = other DNA
aggacatgatctcataactcacttcctccctgcgtcgtccgattgatctc

SEQ ID NO: 24123 - DNA, 50 bp, synthetic construct
  source 1..50: mol_type = other DNA
atgggacccctattgtccgactagagcgggttctcaagtgtagctgccgc

SEQ ID NO: 24124 - DNA, 50 bp, synthetic construct
  source 1..50: mol_type = other DNA
ttgcgcactcattggacgggacctcaccccctgttgtcaacctttgctga

SEQ ID NO: 24125 - DNA, 50 bp, synthetic construct
  source 1..50: mol_type = other DNA
cagctacgtgtatgccaactttaaggcatcggcggcttgaaattcgtacg

SEQ ID NO: 24126 - DNA, 50 bp, synthetic construct
  source 1..50: mol_type = other DNA
catggtattcttattcctggccgattaaggcacggtcgtcggcgccatta

SEQ ID NO: 24127 - DNA, 50 bp, synthetic construct
  source 1..50: mol_type = other DNA
gcgtctcttatccaggtccgttgacaaattgtttttgtgtcccgacacgc

SEQ ID NO: 24128 - DNA, 50 bp, synthetic construct
  source 1..50: mol_type = other DNA
gccccttcactttgtagagtcatgggcatcctcttcttttattttaatac

SEQ ID NO: 24129 - DNA, 50 bp, synthetic construct
  source 1..50: mol_type = other DNA
attaccggcttttagattccaaagaaccccttccaagcaggcgggttcca

SEQ ID NO: 24130 - DNA, 50 bp, synthetic construct
  source 1..50: mol_type = other DNA
ccgcgtctagctccgtccgtttaggtggaactctcggcttggactatcat

SEQ ID NO: 24131 - DNA, 50 bp, synthetic construct
  source 1..50: mol_type = other DNA
gtacctcgaaatgaggtcaaaccatgacctcgaaccataacgtacatgtc

SEQ ID NO: 24132 - DNA, 50 bp, synthetic construct
  source 1..50: mol_type = other DNA
cactgtgccttaccctcggccggcgcctccaccaaaaggcaccagttcgt

SEQ ID NO: 24133 - DNA, 50 bp, synthetic construct; identical to SEQ ID NO: 23482
  source 1..50: mol_type = other DNA

SEQ ID NO: 24134 - DNA, 50 bp, synthetic construct
  source 1..50: mol_type = other DNA
caattcaccttttcctacacgttaacgcatctgttggtcctacaaccgaa

SEQ ID NO: 24135 - DNA, 50 bp, synthetic construct
  source 1..50: mol_type = other DNA
tggtagtccactacgacccctgagacagctctgacggcagcattctacac

SEQ ID NO: 24136 - DNA, 50 bp, synthetic construct; identical to SEQ ID NO: 23787
  source 1..50: mol_type = other DNA

SEQ ID NO: 24137 - DNA, 50 bp, synthetic construct
  source 1..50: mol_type = other DNA
gggtgacagagctggtcctcgagccgctttaacgtcatgctcatttctac

SEQ ID NO: 24138 - DNA, 50 bp, synthetic construct
  source 1..50: mol_type = other DNA
ctttactgacgattatggcgtattcgcgtgtctcgacgtaccgagccaca

SEQ ID NO: 24139 - DNA, 50 bp, synthetic construct
  source 1..50: mol_type = other DNA
gtagggcttggggcagaaactgcccctgccaccacccctcgcgccctgga

SEQ ID NO: 24140 - DNA, 50 bp, synthetic construct; identical to SEQ ID NO: 23206
  source 1..50: mol_type = other DNA

SEQ ID NO: 24141 - DNA, 50 bp, synthetic construct
  source 1..50: mol_type = other DNA
ctgatggcaacttttcaatcgcctactgaacaccgatcccctctttaagg

SEQ ID NO: 24142 - DNA, 50 bp, synthetic construct; identical to SEQ ID NO: 23268
  source 1..50: mol_type = other DNA

SEQ ID NO: 24143 - DNA, 50 bp, synthetic construct
  source 1..50: mol_type = other DNA
gttctcttcgtaacttaacttcggggtcatttgccgccggcattgatatt

SEQ ID NO: 24144 - DNA, 50 bp, synthetic construct; identical to SEQ ID NO: 23905
  source 1..50: mol_type = other DNA

SEQ ID NO: 24145 - DNA, 50 bp, synthetic construct
  source 1..50: mol_type = other DNA
gcttgggcctctatcgaccaagaggagctttatcgaaatcccgatcggag

SEQ ID NO: 24146 - DNA, 50 bp, synthetic construct
  source 1..50: mol_type = other DNA
cgtcagtctgacgctcacgattctaggcatcagctttccctttgtcgggt

SEQ ID NO: 24147 - DNA, 50 bp, synthetic construct
  source 1..50: mol_type = other DNA
gatatcgaaatgtaacttaaacccgttagctacacatcctatccggcctc

SEQ ID NO: 24148 - DNA, 50 bp, synthetic construct
  source 1..50: mol_type = other DNA
acagtagatggtcaccgtgcgggaaaaacgtaacaacaatccacttcacc

SEQ ID NO: 24149 - DNA, 50 bp, synthetic construct
  source 1..50: mol_type = other DNA
acctcctggcttggttattcgcaacttttcgaagacctactggactccca

SEQ ID NO: 24150 - DNA, 50 bp, synthetic construct
  source 1..50: mol_type = other DNA
cccccatgcgtcccttcactttgtagagtcatggacgtccttccctatga

SEQ ID NO: 24151 - DNA, 50 bp, synthetic construct
  source 1..50: mol_type = other DNA
tatgaccgctccaattcgtgaattccacgcctcggcttccctatggttca

SEQ ID NO: 24152 - DNA, 50 bp, synthetic construct
  source 1..50: mol_type = other DNA
atgctcaacggaaacggccgttccaattcacactgctgtgtgcataggct

SEQ ID NO: 24153 - DNA, 50 bp, synthetic construct; identical to SEQ ID NO: 24107
  source 1..50: mol_type = other DNA

SEQ ID NO: 24154 - DNA, 50 bp, synthetic construct
  source 1..50: mol_type = other DNA
gcatggggtttggctgtgtccatcagtccaacttttatgattccgcaagc

SEQ ID NO: 24155 - DNA, 50 bp, synthetic construct
  source 1..50: mol_type = other DNA
gtcttcctttgaagacccatcccctcgttgcacatgcccgtcttcgtctt

SEQ ID NO: 24156 - DNA, 50 bp, synthetic construct
  source 1..50: mol_type = other DNA
ccccattcggatctatatggacagactggctatcgcttgatcatggcact

SEQ ID NO: 24157 - DNA, 50 bp, synthetic construct
  source 1..50: mol_type = other DNA
tatcagggactttggtacgcggatgttcgccagcctcgaaacattcttca

SEQ ID NO: 24158 - DNA, 50 bp, synthetic construct
  source 1..50: mol_type = other DNA
ctacgggtctgttgatcctccaaccgagtcttcgtcggtaggaaatttct

SEQ ID NO: 24159 - DNA, 50 bp, synthetic construct
  source 1..50: mol_type = other DNA
acactatgaaccatccccaacacacacgccacaacacccggggttacccc

SEQ ID NO: 24160 - DNA, 50 bp, synthetic construct
  source 1..50: mol_type = other DNA
caacgtctgggctttggcccactagatcggtactcgtccaacttcaactc

SEQ ID NO: 24161 - DNA, 50 bp, synthetic construct
  source 1..50: mol_type = other DNA
ctcagacgctcagtcaccgcccaccgctcgtattcggcacaccgcatacg

SEQ ID NO: 24162 - DNA, 50 bp, synthetic construct
  source 1..50: mol_type = other DNA
accagtacagacggccgtaccgcgtcactccacgcccgtatatctgcttg

SEQ ID NO: 24163 - DNA, 50 bp, synthetic construct
  source 1..50: mol_type = other DNA
cagtctgtcacagtctatttacagtaacagttttccctttgtcgggtcta

SEQ ID NO: 24164 - DNA, 50 bp, synthetic construct
  source 1..50: mol_type = other DNA
tcccgtccccaccttcacaccattgtgtacctcgactgacgatgattatc

SEQ ID NO: 24165 - DNA, 50 bp, synthetic construct
  source 1..50: mol_type = other DNA
aaataacccaaatttccctcgcatctacctacaaattcagtcaacacttt

SEQ ID NO: 24166 - DNA, 50 bp, synthetic construct
  source 1..50: mol_type = other DNA
tcacgcattatcgagtgaccagctcactgagacgcggcttttaagttgcc

SEQ ID NO: 24167 - DNA, 50 bp, synthetic construct
  source 1..50: mol_type = other DNA
ccatcagctccgctcatcggagtccactcgctcgcttgagagcaattcct

SEQ ID NO: 24168 - DNA, 50 bp, synthetic construct; identical to SEQ ID NO: 23621
  source 1..50: mol_type = other DNA

SEQ ID NO: 24169 - DNA, 50 bp, synthetic construct
  source 1..50: mol_type = other DNA
tcgcgtacattagtatgagggctcttttaggcgatttgaagtaggacaac

SEQ ID NO: 24170 - DNA, 50 bp, synthetic construct
  source 1..50: mol_type = other DNA
cccatcggccggcgcctccaccaaaaggcaccagttcgtgcgtcgggcag

SEQ ID NO: 24171 - DNA, 50 bp, synthetic construct
  source 1..50: mol_type = other DNA
ctccaccaaaaggcaccagttcgtgcgtcgcgcgtagtatccgtttaggc

SEQ ID NO: 24172 - DNA, 50 bp, synthetic construct; identical to SEQ ID NO: 23677
  source 1..50: mol_type = other DNA

SEQ ID NO: 24173 - DNA, 50 bp, synthetic construct; identical to SEQ ID NO: 23152
  source 1..50: mol_type = other DNA

SEQ ID NO: 24174 - DNA, 50 bp, synthetic construct
  source 1..50: mol_type = other DNA
agcttgagcctctatcgaccaagaggggctttatcgaaatcccgatcgga

SEQ ID NO: 24175 - DNA, 50 bp, synthetic construct; identical to SEQ ID NO: 23221
  source 1..50: mol_type = other DNA

SEQ ID NO: 24176 - DNA, 50 bp, synthetic construct; identical to SEQ ID NO: 23276
  source 1..50: mol_type = other DNA

SEQ ID NO: 24177 - DNA, 50 bp, synthetic construct
  source 1..50: mol_type = other DNA
tccaattctcctcccaaatcgcaatcgcttctagacttaacttcggggtc

SEQ ID NO: 24178 - DNA, 50 bp, synthetic construct
  source 1..50: mol_type = other DNA
ccatgggcatggcatttgcctgtgtgcatcagcccaacttatatgattcc

SEQ ID NO: 24179 - DNA, 50 bp, synthetic construct
  source 1..50: mol_type = other DNA
tgacaaatagtttttgtgtcgagagacgatttagcattctactacatatc

SEQ ID NO: 24180 - DNA, 50 bp, synthetic construct
  source 1..50: mol_type = other DNA
ataaccttaagattggacgccgagacttagctcagccccctgtaacaatc

SEQ ID NO: 24181 - DNA, 50 bp, synthetic construct
  source 1..50: mol_type = other DNA
tagttgactctaaggcattcatcaccgctcgcttgcgccttctccggttt

SEQ ID NO: 24182 - DNA, 50 bp, synthetic construct
  source 1..50: mol_type = other DNA
tttgaggccaccatattctacctgggcgcagactaatcggtcaaccgccc

SEQ ID NO: 24183 - DNA, 50 bp, synthetic construct
  source 1..50: mol_type = other DNA
tcggggcatggacctgcgaacggcagaaggctagcgcacagggttcatcg

SEQ ID NO: 24184 - DNA, 50 bp, synthetic construct
  source 1..50: mol_type = other DNA
tcatccgttcgacgcctccctgcgtcactccatcgagtaggggccactac

SEQ ID NO: 24185 - DNA, 50 bp, synthetic construct
  source 1..50: mol_type = other DNA
cgagtgatcagctcctcagaccgcacctattattagcccataattcaaca

SEQ ID NO: 24186 - DNA, 50 bp, synthetic construct
  source 1..50: mol_type = other DNA
aaccaccccatttccggatggttccgctgctaggcattgaccagactctc

SEQ ID NO: 24187 - DNA, 50 bp, synthetic construct
  source 1..50: mol_type = other DNA
tagtttgagacttacggccgattaactactagtcgtcagtctgatgcact

SEQ ID NO: 24188 - DNA, 50 bp, synthetic construct
  source 1..50: mol_type = other DNA
gacttttcccgcatttcaacgtacgtcatgtgggctttggcccactggat

SEQ ID NO: 24189 - DNA, 50 bp, synthetic construct
  source 1..50: mol_type = other DNA
gtttaggcgacacgtactctgcttcggcactacacctcgcttgatttcat

SEQ ID NO: 24190 - DNA, 50 bp, synthetic construct
  source 1..50: mol_type = other DNA
cgtctttccaaaaaccctttcggacggtctctcccactttcggggcattc

SEQ ID NO: 24191 - DNA, 50 bp, synthetic construct
  source 1..50: mol_type = other DNA
ggtactataccgttctctctcctatcttcttgccctagctttcgggccgg

SEQ ID NO: 24192 - DNA, 50 bp, synthetic construct
  source 1..50: mol_type = other DNA
aacatcctttgatatcaccatcccctcgcaacatatgctcatcttcggca

SEQ ID NO: 24193 - DNA, 50 bp, synthetic construct
  source 1..50: mol_type = other DNA
gccacttgactttgtagattcatcggcctccttctctttcttttgagcta

SEQ ID NO: 24194 - DNA, 50 bp, synthetic construct
  source 1..50: mol_type = other DNA
ggactacgtcgctgcggcgcactcacttcttcataaagccatacatttcg

SEQ ID NO: 24195 - DNA, 50 bp, synthetic construct
  source 1..50: mol_type = other DNA
aagggagtattaccagcctttggtaatcttctcacgtttccgtcttccct

SEQ ID NO: 24196 - DNA, 50 bp, synthetic construct; identical to SEQ ID NO: 23166
  source 1..50: mol_type = other DNA

SEQ ID NO: 24197 - DNA, 50 bp, synthetic construct
  source 1..50: mol_type = other DNA
tattgtccgaatagagggggttctcaagtgtagctgcccctccaaaccgt

SEQ ID NO: 24198 - DNA, 50 bp, synthetic construct
  source 1..50: mol_type = other DNA
ccctatttcccaggagtgtcattacactccgcgtctcttatccaggtccg

SEQ ID NO: 24199 - DNA, 50 bp, synthetic construct
  source 1..50: mol_type = other DNA
agactcccagcaacatctgatgctgcaactatcctacgtccacatttcca

SEQ ID NO: 24200 - DNA, 50 bp, synthetic construct
  source 1..50: mol_type = other DNA
ttcgatcactacagtgagacggttcttttcgaagatcgcaattacttatg

SEQ ID NO: 24201 - DNA, 50 bp, synthetic construct; identical to SEQ ID NO: 23631
  source 1..50: mol_type = other DNA

SEQ ID NO: 24202 - DNA, 50 bp, synthetic construct
  source 1..50: mol_type = other DNA
cccccccctttccaccggcgcctccccttcccccccccccctcccaaaaa

SEQ ID NO: 24203 - DNA, 50 bp, synthetic construct
  source 1..50: mol_type = other DNA
gccccccatctcgatgacctacgaactcccgggcatagcccatggctgtc

SEQ ID NO: 24204 - DNA, 50 bp, synthetic construct
  source 1..50: mol_type = other DNA
cacgttgtctccattcgccttaaggatcacatcgccactttacgcatcta

SEQ ID NO: 24205 - DNA, 50 bp, synthetic construct; identical to SEQ ID NO: 23214
  source 1..50: mol_type = other DNA

SEQ ID NO: 24206 - DNA, 50 bp, synthetic construct
  source 1..50: mol_type = other DNA
gctaatcagccttcctcatctgcgctttggttcactagatgggaaccagt

SEQ ID NO: 24207 - DNA, 50 bp, synthetic construct
  source 1..50: mol_type = other DNA
tttccaggcgagtcgggccaaccgttagcccaccgctcacgttcacgtgt

SEQ ID NO: 24208 - DNA, 50 bp, synthetic construct
  source 1..50: mol_type = other DNA
tggaatagtttgaggcttccccgtataaaatgtcggaccctcactccgac

SEQ ID NO: 24209 - DNA, 50 bp, synthetic construct; identical to SEQ ID NO: 23207
  source 1..50: mol_type = other DNA

SEQ ID NO: 24210 - DNA, 50 bp, synthetic construct
  source 1..50: mol_type = other DNA
atctacatctaaggacatccgtttaggcgtccctctcagctggaactgtc

SEQ ID NO: 24211 - DNA, 50 bp, synthetic construct
  source 1..50: mol_type = other DNA
gccccccaccgtgtccggtcccccatcgctgacaaatggtttttgtgtcc

SEQ ID NO: 24212 - DNA, 50 bp, synthetic construct
  source 1..50: mol_type = other DNA
atgcaggactccctctttcaccccctagaagcctggagtgcgatagtcta

SEQ ID NO: 24213 - DNA, 50 bp, synthetic construct
  source 1..50: mol_type = other DNA
ccatcagttttccctttctcgggtctggtggccgattccagggtttcaca

SEQ ID NO: 24214 - DNA, 50 bp, synthetic construct
  source 1..50: mol_type = other DNA
tgggtttctattctatagggtgactaagttagtccattctagggaacatc

SEQ ID NO: 24215 - DNA, 50 bp, synthetic construct
  source 1..50: mol_type = other DNA
ctacaggcttacccctttggaccgggaccaatacaccccaatgggaagtc

SEQ ID NO: 24216 - DNA, 50 bp, synthetic construct
  source 1..50: mol_type = other DNA
atggaattcctcactgcacctctgcctccgcactgtcgcggcgcctgact

SEQ ID NO: 24217 - DNA, 50 bp, synthetic construct
  source 1..50: mol_type = other DNA
cgtccacccgctcctctcttaggactctgcttgccctcttgggaacaatt

SEQ ID NO: 24218 - DNA, 50 bp, synthetic construct
  source 1..50: mol_type = other DNA
taacaattcaccttttcctacaccccaacgtgtctgttgatcctacaatc

SEQ ID NO: 24219 - DNA, 50 bp, synthetic construct
  source 1..50: mol_type = other DNA
gccctttgaccctcattatggcttacacgggatgccccctttctaaatag

SEQ ID NO: 24220 - DNA, 50 bp, synthetic construct
  source 1..50: mol_type = other DNA
gggactacgtcgttgcggcgcacacccttcttccagaagcctaacatttg

SEQ ID NO: 24221 - DNA, 50 bp, synthetic construct
  source 1..50: mol_type = other DNA
tccgttcgcacaattgtccccactgcgtctgtccatcgacgtcacgcggc

SEQ ID NO: 24222 - DNA, 50 bp, synthetic construct
  source 1..50: mol_type = other DNA
ataagtggcatagtaacgactatatgctaatgatcgctaaggtcgaagta

SEQ ID NO: 24223 - DNA, 50 bp, synthetic construct
  source 1..50: mol_type = other DNA
ctccaccaaaaggcaccagttcgtgcgtcgggcagggtatccgtttaggc

SEQ ID NO: 24224 - DNA, 50 bp, synthetic construct; identical to SEQ ID NO: 23198
  source 1..50: mol_type = other DNA

SEQ ID NO: 24225 - DNA, 50 bp, synthetic construct
  source 1..50: mol_type = other DNA
tcagctgaaggctcttttagaagattcaatatcatatacaatgggcatgg

SEQ ID NO: 24226 - DNA, 50 bp, synthetic construct; identical to SEQ ID NO: 23277
  source 1..50: mol_type = other DNA

SEQ ID NO: 24227 - DNA, 50 bp, synthetic construct
  source 1..50: mol_type = other DNA
ttcgtgcttcggatgaggttctactctagagggtaagcgttcttcattct

SEQ ID NO: 24228 - DNA, 50 bp, synthetic construct
  source 1..50: mol_type = other DNA
tctaaccaacctttagttagcgtctcacatttccatattccctcgaactg

SEQ ID NO: 24229 - DNA, 50 bp, synthetic construct; identical to SEQ ID NO: 23179
  source 1..50: mol_type = other DNA

SEQ ID NO: 24230 - DNA, 50 bp, synthetic construct
  source 1..50: mol_type = other DNA
gtcggttcatcgcacgtcctactgccgggatacccaacatttgacgaaaa

SEQ ID NO: 24231 - DNA, 50 bp, synthetic construct
  source 1..50: mol_type = other DNA
accccaccagcggaggttttcacattgcctccgaagatttccacgggagt

SEQ ID NO: 24232 - DNA, 50 bp, synthetic construct
  source 1..50: mol_type = other DNA
cgcttcgccgaccaatggtccgtttaggccaatggtattccaatctcgca

SEQ ID NO: 24233 - DNA, 50 bp, synthetic construct
  source 1..50: mol_type = other DNA
cttgattgcttcagtctaacgattctgtcgatcctacaaccgaaccttcg

SEQ ID NO: 24234 - DNA, 50 bp, synthetic construct
  source 1..50: mol_type = other DNA
gccggatggttccgctgctaggtatcggccggactctcccacttgccggt

SEQ ID NO: 24235 - DNA, 50 bp, synthetic construct
  source 1..50: mol_type = other DNA
aattcaccttttcctacaccctaaagcttctgttggtcctacaaccgagt

SEQ ID NO: 24236 - DNA, 50 bp, synthetic construct
  source 1..50: mol_type = other DNA
tagagcagccttagaccctcctggtagaggattgggatttatgagagatc

SEQ ID NO: 24237 - DNA, 50 bp, synthetic construct
  source 1..50: mol_type = other DNA
ttccaagcaggcgggacccattcagccctggattgcgctccggctttccg

SEQ ID NO: 24238 - DNA, 50 bp, synthetic construct; identical to SEQ ID NO: 23247
  source 1..50: mol_type = other DNA

SEQ ID NO: 24239 - DNA, 50 bp, synthetic construct
  source 1..50: mol_type = other DNA
tacgaccaatggacgcggtcctgcctttctggggtacctcgaaatgaggt

SEQ ID NO: 24240 - DNA, 50 bp, synthetic construct
  source 1..50: mol_type = other DNA
acccccaatgcgccccttcactttgtagagtcatgggcatcctcttcttt

SEQ ID NO: 24241 - DNA, 50 bp, synthetic construct
  source 1..50: mol_type = other DNA
atccatcaaccaccccattaccggatggttcggctgctaggtatcgacca

SEQ ID NO: 24242 - DNA, 50 bp, synthetic construct; identical to SEQ ID NO: 23169
  source 1..50: mol_type = other DNA

SEQ ID NO: 24243 - DNA, 50 bp, synthetic construct
  source 1..50: mol_type = other DNA
tcggagccgcactcccgataccggcgggcatggggtttggctgtgaccac

SEQ ID NO: 24244 - DNA, 50 bp, synthetic construct
  source 1..50: mol_type = other DNA
caacccgacaagcgggtaatttcgccgtgcgctcgacccaagtcttgcag

SEQ ID NO: 24245 - DNA, 50 bp, synthetic construct
  source 1..50: mol_type = other DNA
accgcctctccggcaaccctatggtaggaacgctataaccttaagattgg

SEQ ID NO: 24246 - DNA, 50 bp, synthetic construct
  source 1..50: mol_type = other DNA
ctaaatctaacaaagatcaccgcctgcccactcattgcgcacccattgga

SEQ ID NO: 24247 - DNA, 50 bp, synthetic construct; identical to SEQ ID NO: 23775
  source 1..50: mol_type = other DNA

SEQ ID NO: 24248 - DNA, 50 bp, synthetic construct; identical to SEQ ID NO: 23899
  source 1..50: mol_type = other DNA

SEQ ID NO: 24249 - DNA, 50 bp, synthetic construct; identical to SEQ ID NO: 23182
  source 1..50: mol_type = other DNA

SEQ ID NO: 24250 - DNA, 50 bp, synthetic construct
  source 1..50: mol_type = other DNA
ccctttgttgggtctggcggtcgattccaggggtttagtagtgattcacc

SEQ ID NO: 24251 - DNA, 50 bp, synthetic construct
  source 1..50: mol_type = other DNA
gaggcacttcgacattccttcgcttcttcgcctccacaggcttaccccct

SEQ ID NO: 24252 - DNA, 50 bp, synthetic construct
  source 1..50: mol_type = other DNA
gaattctcccggtctcagtcacccccgtctgggctttggcccactagata

SEQ ID NO: 24253 - DNA, 50 bp, synthetic construct
  source 1..50: mol_type = other DNA
cccgggaagccccaggacttcgggcgtacaccttgtgcacaaactatccg

SEQ ID NO: 24254 - DNA, 50 bp, synthetic construct
  source 1..50: mol_type = other DNA
cattgcgcacccgttggacggaatatgtccccctattgtcagtctttacc

SEQ ID NO: 24255 - DNA, 50 bp, synthetic construct; identical to SEQ ID NO: 23871
  source 1..50: mol_type = other DNA

SEQ ID NO: 24256 - DNA, 50 bp, synthetic construct
  source 1..50: mol_type = other DNA
cgacggatcttttcgtagccgcgctccaaaatcggcgggcatggggtttg

SEQ ID NO: 24257 - DNA, 50 bp, synthetic construct
  source 1..50: mol_type = other DNA
tgctttcagcccgaatcactaggccaccatggcataccttcccggtagcg

SEQ ID NO: 24258 - DNA, 50 bp, synthetic construct
  source 1..50: mol_type = other DNA
aacggtcgtgcaataccacccttgagtgccccctggcggccccaattgag

SEQ ID NO: 24259 - DNA, 50 bp, synthetic construct
  source 1..50: mol_type = other DNA
cgtccgtactcatcgcacactgcccacccttagggcaggcggctaatagg

SEQ ID NO: 24260 - DNA, 50 bp, synthetic construct
  source 1..50: mol_type = other DNA
gttatttcaaaagaaataaccccaacgcctgtatagtattgcttctccat

SEQ ID NO: 24261 - DNA, 50 bp, synthetic construct
  source 1..50: mol_type = other DNA
tacgctttctcttctaggcggtcgacttaggtctcatggcggcctgtgca

SEQ ID NO: 24262 - DNA, 50 bp, synthetic construct
  source 1..50: mol_type = other DNA
gattccagggccttaggacagactcaatcagattgcttcagaccagagct

SEQ ID NO: 24263 - DNA, 50 bp, synthetic construct
  source 1..50: mol_type = other DNA
gccgggtggttccgctgctaaccatcggcctgactctccaacttgccggt

SEQ ID NO: 24264 - DNA, 50 bp, synthetic construct
  source 1..50: mol_type = other DNA
ctctatcgagcatgaggggctttacgtaaatccacgtcggaactgaatat

SEQ ID NO: 24265 - DNA, 50 bp, synthetic construct
  source 1..50: mol_type = other DNA
gtacaaatgtacgacccatcccctcgcaacatatgcgccactttgtcatc

SEQ ID NO: 24266 - DNA, 50 bp, synthetic construct
  source 1..50: mol_type = other DNA
aacagcttccacacttaacttcggggtcatttgccgccggcattgatatt

SEQ ID NO: 24267 - DNA, 50 bp, synthetic construct
  source 1..50: mol_type = other DNA
ctgtaattcttagtacctccatctcgtgacaaacccactccccaggtagg

SEQ ID NO: 24268 - DNA, 50 bp, synthetic construct; identical to SEQ ID NO: 23706
  source 1..50: mol_type = other DNA

SEQ ID NO: 24269 - DNA, 50 bp, synthetic construct; identical to SEQ ID NO: 23273
  source 1..50: mol_type = other DNA

SEQ ID NO: 24270 - DNA, 50 bp, synthetic construct
  source 1..50: mol_type = other DNA
ctttcgtcgccacctgacatgtgctcactcttacggccttactcatcgct

SEQ ID NO: 24271 - DNA, 50 bp, synthetic construct
  source 1..50: mol_type = other DNA
cttccccctcctctccccccttccccccccccccccccccccccccctcc

SEQ ID NO: 24272 - DNA, 50 bp, synthetic construct
  source 1..50: mol_type = other DNA
ctaggctcctacaggcttacccctttggaccgtggacaataccccacaat

SEQ ID NO: 24273 - DNA, 50 bp, synthetic construct
  source 1..50: mol_type = other DNA
ccattggtcaactataagaccatggccgaacagtggcaggcacagctcca

SEQ ID NO: 24274 - DNA, 50 bp, synthetic construct
  source 1..50: mol_type = other DNA
cttatcccgctcgctcagtcggcctcatctgggctttggcccactagata

SEQ ID NO: 24275 - DNA, 50 bp, synthetic construct; identical to SEQ ID NO: 23195
  source 1..50: mol_type = other DNA

SEQ ID NO: 24276 - DNA, 50 bp, synthetic construct
  source 1..50: mol_type = other DNA
cacgttcgtagttccaacccaacatcacttcatgcgttgggatattcgac

SEQ ID NO: 24277 - DNA, 50 bp, synthetic construct
  source 1..50: mol_type = other DNA
gccctcttccccgcgaccgctattcagtcggcgtcacttttccgggttcg

SEQ ID NO: 24278 - DNA, 50 bp, synthetic construct
  source 1..50: mol_type = other DNA
tcacgccttgcctatttgcgactttcgtagattcgcacttcggctggagt

SEQ ID NO: 24279 - DNA, 50 bp, synthetic construct
  source 1..50: mol_type = other DNA
tagccccatccgtttaggcgggactctcagcttggactgtcatgggcctc

SEQ ID NO: 24280 - DNA, 50 bp, synthetic construct
  source 1..50: mol_type = other DNA
atcgctcttcctcacgaattcgttaattcggcgtcacttctccgggttcg

SEQ ID NO: 24281 - DNA, 50 bp, synthetic construct
  source 1..50: mol_type = other DNA
ctaagtgccaattccttgatccgtttgactgggacattgaagccctattt

SEQ ID NO: 24282 - DNA, 50 bp, synthetic construct
  source 1..50: mol_type = other DNA
gaatttcctgctattactgccatgaaatcctccttcgaggccgattgatg

SEQ ID NO: 24283 - DNA, 50 bp, synthetic construct
  source 1..50: mol_type = other DNA
acatccatattcattgctatttcccccgccctttgggggagcggctttct

SEQ ID NO: 24284 - DNA, 50 bp, synthetic construct
  source 1..50: mol_type = other DNA
catcccttcgctcactcaagtgcgaccgctcttttcgacgatcatgtagg

SEQ ID NO: 24285 - DNA, 50 bp, synthetic construct
  source 1..50: mol_type = other DNA
ctataagaccatgggctcatatacgcggggactatttcgtgactatgatt

SEQ ID NO: 24286 - DNA, 50 bp, synthetic construct; identical to SEQ ID NO: 23211
  source 1..50: mol_type = other DNA

SEQ ID NO: 24287 - DNA, 50 bp, synthetic construct
  source 1..50: mol_type = other DNA
gtatcatcataggactcatcgcgcctcgtgctccttaagacgcacttaga

SEQ ID NO: 24288 - DNA, 50 bp, synthetic construct; identical to SEQ ID NO: 23238
  source 1..50: mol_type = other DNA

SEQ ID NO: 24289 - DNA, 50 bp, synthetic construct
  source 1..50: mol_type = other DNA
ctgaatgttcgtcagtggcgaggtattctcacaccaccgcacggataact

SEQ ID NO: 24290 - DNA, 50 bp, synthetic construct
  source 1..50: mol_type = other DNA
caatagggcccgctaccaacggggcccgcattccctggctttatatcatc

SEQ ID NO: 24291 - DNA, 50 bp, synthetic construct
  source 1..50: mol_type = other DNA
tcccctcactttctcttggactttggcacctgaatgttcgtcagtaccgt

SEQ ID NO: 24292 - DNA, 50 bp, synthetic construct
  source 1..50: mol_type = other DNA
cctgtacgactgatacaattcttgtactaatgaccacgacgcgtttacct

SEQ ID NO: 24293 - DNA, 50 bp, synthetic construct
  source 1..50: mol_type = other DNA
ctgctagtcatcggctggactctcccactggccggtgtaaccctgactct

SEQ ID NO: 24294 - DNA, 50 bp, synthetic construct
  source 1..50: mol_type = other DNA
tccgggtggttccgctgctagtcatcggcctgactctccaacttgccggt

SEQ ID NO: 24295 - DNA, 50 bp, synthetic construct
  source 1..50: mol_type = other DNA
ctcactctcgaggcttaacttcggggccatttgccgccggcattgatatt

SEQ ID NO: 24296 - DNA, 50 bp, synthetic construct
  source 1..50: mol_type = other DNA
cgaccaaccatgcaagtccagctttcccagtcttttagatggaaagtgat

SEQ ID NO: 24297 - DNA, 50 bp, synthetic construct
  source 1..50: mol_type = other DNA
ctacccctcgcttcaaatcatcgcttcaatcactacagtgtgacggttct

SEQ ID NO: 24298 - DNA, 50 bp, synthetic construct; identical to SEQ ID NO: 23175
  source 1..50: mol_type = other DNA

SEQ ID NO: 24299 - DNA, 50 bp, synthetic construct
  source 1..50: mol_type = other DNA
gacttaaaggatcccccgcagtttcgaatggcttcttatagtttgaggct

SEQ ID NO: 24300 - DNA, 50 bp, synthetic construct
  source 1..50: mol_type = other DNA
tttaggcggccgatacacgaactctggactacccgcgggtgagccaccca

SEQ ID NO: 24301 - DNA, 50 bp, synthetic construct
  source 1..50: mol_type = other DNA
attggtacgagggctcttttaggcgatttgaataggtacgccgtgggcat

SEQ ID NO: 24302 - DNA, 50 bp, synthetic construct; identical to SEQ ID NO: 23234
  source 1..50: mol_type = other DNA

SEQ ID NO: 24303 - DNA, 50 bp, synthetic construct
  source 1..50: mol_type = other DNA
tggaaaacatcttaccaggccgctcaataccatacgtcgcaccaattcct

SEQ ID NO: 24304 - DNA, 50 bp, synthetic construct
  source 1..50: mol_type = other DNA
cacgtttgagctttctactgcatatgtcggactgtggacgggccacggcc

SEQ ID NO: 24305 - DNA, 50 bp, synthetic construct
  source 1..50: mol_type = other DNA
cttggggcacgcttaggcgggtctggcaacccattcggacttataaggac

SEQ ID NO: 24306 - DNA, 50 bp, synthetic construct; identical to SEQ ID NO: 24281
  source 1..50: mol_type = other DNA

SEQ ID NO: 24307 - DNA, 50 bp, synthetic construct
  source 1..50: mol_type = other DNA
tccatgcgagtctaacctacctttggttagctgctcacgttaacgtcttc

SEQ ID NO: 24308 - DNA, 50 bp, synthetic construct
  source 1..50: mol_type = other DNA
ttgctctaaggcattcatcaccgctcgcttgcgccttctcccgtttggct

SEQ ID NO: 24309 - DNA, 50 bp, synthetic construct; identical to SEQ ID NO: 24057
  source 1..50: mol_type = other DNA

SEQ ID NO: 24310 - DNA, 50 bp, synthetic construct
  source 1..50: mol_type = other DNA
cctagtcccaatcagcccaggattccgagtcggcttgccactccggctac

SEQ ID NO: 24311 - DNA, 50 bp, synthetic construct
  source 1..50: mol_type = other DNA
ttcgtgcgtcggtcagcgtatccgtttaggcacgccgcacataccgctcc

SEQ ID NO: 24312 - DNA, 50 bp, synthetic construct; identical to SEQ ID NO: 23250
  source 1..50: mol_type = other DNA

SEQ ID NO: 24313 - DNA, 50 bp, synthetic construct; identical to SEQ ID NO: 23258
  source 1..50: mol_type = other DNA

SEQ ID NO: 24314 - DNA, 50 bp, synthetic construct
  source 1..50: mol_type = other DNA
aaataacccaaatttccctcgcatccggcggaaaattcgcacaacacttt

SEQ ID NO: 24315 - DNA, 50 bp, synthetic construct
  source 1..50: mol_type = other DNA
gtgcatctgcttttcctcgctctcgatcgtcctaggtctcatggcgcccc

SEQ ID NO: 24316 - DNA, 50 bp, synthetic construct
  source 1..50: mol_type = other DNA
agaaccctcacaaaaactacgaagaccccacccactcacacacttggcta

SEQ ID NO: 24317 - DNA, 50 bp, synthetic construct; identical to SEQ ID NO: 23213
  source 1..50: mol_type = other DNA

SEQ ID NO: 24318 - DNA, 50 bp, synthetic construct
  source 1..50: mol_type = other DNA
gccaggtctgaggatgccctccgtcgtcaccccttataacctgttacccg

SEQ ID NO: 24319 - DNA, 50 bp, synthetic construct
  source 1..50: mol_type = other DNA
tttatgagggctctctggctatcgcttggtcatggcactccctttccact

SEQ ID NO: 24320 - DNA, 50 bp, synthetic construct
  source 1..50: mol_type = other DNA
ccgccctcttcgtaacagttccttgagccgttttactggggcattgaagc

SEQ ID NO: 24321 - DNA, 50 bp, synthetic construct
  source 1..50: mol_type = other DNA
tctgtcaagccagggataggcagcgcccgcatcctttaaactctcctaga

SEQ ID NO: 24322 - DNA, 50 bp, synthetic construct; identical to SEQ ID NO: 24293
  source 1..50: mol_type = other DNA

SEQ ID NO: 24323 - DNA, 50 bp, synthetic construct
  source 1..50: mol_type = other DNA
ccactctcaggacatcgacttctactactacacacccaacaacccaacgg

SEQ ID NO: 24324 - DNA, 50 bp, synthetic construct
  source 1..50: mol_type = other DNA
actaagcttggactgtcatacggcgcaggaggccctgttccgttatcacg

SEQ ID NO: 24325 - DNA, 50 bp, synthetic construct; identical to SEQ ID NO: 23229
  source 1..50: mol_type = other DNA

SEQ ID NO: 24326 - DNA, 50 bp, synthetic construct
  source 1..50: mol_type = other DNA
tacaactaatagggtccgtttaggccctattctcagcttggactatcata

SEQ ID NO: 24327 - DNA, 50 bp, synthetic construct
  source 1..50: mol_type = other DNA
aaacatcttgccaggccgctcgctaacatacgtcgttccaattcctgaat

SEQ ID NO: 24328 - DNA, 50 bp, synthetic construct; identical to SEQ ID NO: 24163
  source 1..50: mol_type = other DNA

SEQ ID NO: 24329 - DNA, 50 bp, synthetic construct
  source 1..50: mol_type = other DNA
caaagcctcctccgcaacaaccctatgatgggaacacaataccaatgaga

SEQ ID NO: 24330 - DNA, 50 bp, synthetic construct
  source 1..50: mol_type = other DNA
ttcactcttacggccatactcatcgcattctgtccactcttaggacaggt

SEQ ID NO: 24331 - DNA, 50 bp, synthetic construct
  source 1..50: mol_type = other DNA
tgacccctcggttcgcataattgtccacactgcgtccttccatcggcccg

SEQ ID NO: 24332 - DNA, 50 bp, synthetic construct
  source 1..50: mol_type = other DNA
tcttaccaacctttagtaagcgtctcacatttccatattccctcgaactg

SEQ ID NO: 24333 - DNA, 50 bp, synthetic construct
  source 1..50: mol_type = other DNA
gctacagccgagaagcggtggaccccgacatcatacaaggttcccaaccc

SEQ ID NO: 24334 - DNA, 50 bp, synthetic construct; identical to SEQ ID NO: 23899
  source 1..50: mol_type = other DNA

SEQ ID NO: 24335 - DNA, 50 bp, synthetic construct
  source 1..50: mol_type = other DNA
accctcagtcaggcgctctctattcaaggcgcccgttttccccttgtggg

SEQ ID NO: 24336 - DNA, 50 bp, synthetic construct
  source 1..50: mol_type = other DNA
cgctcagactgttcccgctcttcaacatacggtatctgggctttggccca

SEQ ID NO: 24337 - DNA, 50 bp, synthetic construct
  source 1..50: mol_type = other DNA
cttacggccgcggcctctcccactttcggggcatccgcattcggtccgtc

SEQ ID NO: 24338 - DNA, 50 bp, synthetic construct
  source 1..50: mol_type = other DNA
ttggatgctcaatgaaaaaggccgctccaattccccgagtcggggcgtcg

SEQ ID NO: 24339 - DNA, 50 bp, synthetic construct
  source 1..50: mol_type = other DNA
aagccagggataggcagcgcccgcgtcctctaaacttctctcggtaggaa

SEQ ID NO: 24340 - DNA, 50 bp, synthetic construct
  source 1..50: mol_type = other DNA
acacgtacactatgggccgcccccaacacacacgccacaacaccccggac

SEQ ID NO: 24341 - DNA, 50 bp, synthetic construct
  source 1..50: mol_type = other DNA
taatcgatcaaccaccccattaccgggtggttccgtacctaggcatcccc

SEQ ID NO: 24342 - DNA, 50 bp, synthetic construct; identical to SEQ ID NO: 23224
  source 1..50: mol_type = other DNA

SEQ ID NO: 24343 - DNA, 50 bp, synthetic construct
  source 1..50: mol_type = other DNA
aaggtaatctatcatccgccccattgccgggtggatcagaagctacctat

SEQ ID NO: 24344 - DNA, 50 bp, synthetic construct; identical to SEQ ID NO: 23386
  source 1..50: mol_type = other DNA

SEQ ID NO: 24345 - DNA, 50 bp, synthetic construct
  source 1..50: mol_type = other DNA
gccgagtggttctggcgctagccatcggcctgactctccaacttgccggt

SEQ ID NO: 24346 - DNA, 50 bp, synthetic construct; identical to SEQ ID NO: 23254
  source 1..50: mol_type = other DNA

SEQ ID NO: 24347 - DNA, 50 bp, synthetic construct
  source 1..50: mol_type = other DNA
ccaagcaggcgaggttcattcagccctcgattccagtccggctttccgca

SEQ ID NO: 24348 - DNA, 50 bp, synthetic construct
  source 1..50: mol_type = other DNA
agtctgacgtgctctattcaacccgtcagttttccctttctcgggtctgg

SEQ ID NO: 24349 - DNA, 50 bp, synthetic construct
  source 1..50: mol_type = other DNA
accctagagattctgttgatcctacaaccgagtcttcgtcggtaagtaag

SEQ ID NO: 24350 - DNA, 50 bp, synthetic construct
  source 1..50: mol_type = other DNA
tgacagaccatccatttaggcgacccgcacttccaactccgtactacccc

SEQ ID NO: 24351 - DNA, 50 bp, synthetic construct
  source 1..50: mol_type = other DNA
gacacaaatgttcgacaccttgtagaaatatactacttggcgcatgaaaa

SEQ ID NO: 24352 - DNA, 50 bp, synthetic construct
  source 1..50: mol_type = other DNA
gagtggtgtcttccattatcaggacatacaatttgctcttctgaagtcta

SEQ ID NO: 24353 - DNA, 50 bp, synthetic construct
  source 1..50: mol_type = other DNA
ggcattggtagacattaaattcgtttccctgtgaagttttcccacactgg

SEQ ID NO: 24354 - DNA, 50 bp, synthetic construct
  source 1..50: mol_type = other DNA
cgtcccacctacggaaccgtgattctcggctactttctgcactattcgac

SEQ ID NO: 24355 - DNA, 50 bp, synthetic construct
  source 1..50: mol_type = other DNA
agcttgtccctgctttcagcccttatcactaggccgccacggcttacctt

SEQ ID NO: 24356 - DNA, 50 bp, synthetic construct; identical to SEQ ID NO: 23269
  source 1..50: mol_type = other DNA

SEQ ID NO: 24357 - DNA, 50 bp, synthetic construct
  source 1..50: mol_type = other DNA
cctagggaatcccctaccatcctctcgcaagatacatgcgtcttccacat

SEQ ID NO: 24358 - DNA, 50 bp, synthetic construct; identical to SEQ ID NO: 23567
  source 1..50: mol_type = other DNA

SEQ ID NO: 24359 - DNA, 50 bp, synthetic construct
  source 1..50: mol_type = other DNA
ggcctccaccttcggggcgctccccacctcggctggccatgattgcccgc

SEQ ID NO: 24360 - DNA, 50 bp, synthetic construct
  source 1..50: mol_type = other DNA
caggcaggggctctcctcttcttaggtctggcggcagattccagggcctc

SEQ ID NO: 24361 - DNA, 50 bp, synthetic construct; identical to SEQ ID NO: 23237
  source 1..50: mol_type = other DNA

SEQ ID NO: 24362 - DNA, 50 bp, synthetic construct; identical to SEQ ID NO: 24327
  source 1..50: mol_type = other DNA

SEQ ID NO: 24363 - DNA, 50 bp, synthetic construct
  source 1..50: mol_type = other DNA
ttgacacccctgtgccctccctttgtacccggcctttacctttcaggcca

SEQ ID NO: 24364 - DNA, 50 bp, synthetic construct
  source 1..50: mol_type = other DNA
atcagaccgtaactataggcctaagaagacgcatcgtatccaccctcggc

SEQ ID NO: 24365 - DNA, 50 bp, synthetic construct
  source 1..50: mol_type = other DNA
ggtggtcgattccaggggtttatatacaattcaccttttcctacacccca

SEQ ID NO: 24366 - DNA, 50 bp, synthetic construct
  source 1..50: mol_type = other DNA
cactgatggtagtagcacgaacacacaacaacaatccacttcaccacacc

SEQ ID NO: 24367 - DNA, 50 bp, synthetic construct
  source 1..50: mol_type = other DNA
ttctgcagcacctccaggcttggtgtgcatgcacttttcacgcccctact

SEQ ID NO: 24368 - DNA, 50 bp, synthetic construct
  source 1..50: mol_type = other DNA
gtaacttagacccgtgcactacacatcctatccagcctccgaaacttccc

SEQ ID NO: 24369 - DNA, 50 bp, synthetic construct
  source 1..50: mol_type = other DNA
actactcctaccgatgactgcaggacgaacgcgtaacaacaatccacttc

SEQ ID NO: 24370 - DNA, 50 bp, synthetic construct
  source 1..50: mol_type = other DNA
gcaccacggctcttttcgaagccgcagtccgcgcaacggcgggcatgggg

SEQ ID NO: 24371 - DNA, 50 bp, synthetic construct; identical to SEQ ID NO: 23201
  source 1..50: mol_type = other DNA

SEQ ID NO: 24372 - DNA, 50 bp, synthetic construct; identical to SEQ ID NO: 23222
  source 1..50: mol_type = other DNA

SEQ ID NO: 24373 - DNA, 50 bp, synthetic construct
  source 1..50: mol_type = other DNA
ggcgtattaactaggcgctctccatcgtcttgccgaaaccctttcggccg

SEQ ID NO: 24374 - DNA, 50 bp, synthetic construct
  source 1..50: mol_type = other DNA
ccaagcaggcgaggttcaatcagccctcgattccactccggccttccgca

SEQ ID NO: 24375 - DNA, 50 bp, synthetic construct
  source 1..50: mol_type = other DNA
gaggcggagcaccaccaaggaaggaagcccaaccatagcggcgcaccaca

SEQ ID NO: 24376 - DNA, 50 bp, synthetic construct
  source 1..50: mol_type = other DNA
ctcgcttgcgctttctccggtttggctctacgcacgtagagccccaagcc

SEQ ID NO: 24377 - DNA, 50 bp, synthetic construct
  source 1..50: mol_type = other DNA
cccccatctgcgctttggttcactagatgtgaaccggtcctacttcaggg

SEQ ID NO: 24378 - DNA, 50 bp, synthetic construct
  source 1..50: mol_type = other DNA
acattcacggcactccgtaagtcgaaccgtcatgattatccagctcccga

SEQ ID NO: 24379 - DNA, 50 bp, synthetic construct
  source 1..50: mol_type = other DNA
atcatgtactttggaagcccacctaactatcacttccattagggcgaggg

SEQ ID NO: 24380 - DNA, 50 bp, synthetic construct
  source 1..50: mol_type = other DNA
gaaggctagcacaacagggttcatcgcgcccggagcaccttagggcgcac

SEQ ID NO: 24381 - DNA, 50 bp, synthetic construct
  source 1..50: mol_type = other DNA
tcatcactgtcacggcggtagactgccttatctaccaacttcccacatcc

SEQ ID NO: 24382 - DNA, 50 bp, synthetic construct
  source 1..50: mol_type = other DNA
gtgagaacacactggccccaagattggaccatagctcttgtccatgcccc

SEQ ID NO: 24383 - DNA, 50 bp, synthetic construct
  source 1..50: mol_type = other DNA
ttttgcctctctcgacgcgtcctaggtctcatgccggtctgtgcactttg

SEQ ID NO: 24384 - DNA, 50 bp, synthetic construct
  source 1..50: mol_type = other DNA
gccaaccgatgcaagccctccctattggcgactttcgtagattcgccctt

SEQ ID NO: 24385 - DNA, 50 bp, synthetic construct
  source 1..50: mol_type = other DNA
cccctcactttctcttggactttgggacacagatgttcgacaccctcacg

SEQ ID NO: 24386 - DNA, 50 bp, synthetic construct; identical to SEQ ID NO: 23928
  source 1..50: mol_type = other DNA

SEQ ID NO: 24387 - DNA, 50 bp, synthetic construct; identical to SEQ ID NO: 23185
  source 1..50: mol_type = other DNA

SEQ ID NO: 24388 - DNA, 50 bp, synthetic construct
  source 1..50: mol_type = other DNA
ccacttctacggccaatggacgccgttctgcctttctggggtacctcgaa

SEQ ID NO: 24389 - DNA, 50 bp, synthetic construct
  source 1..50: mol_type = other DNA
tgggcgcaacctaatccatcaaccactccattgccgggtggttcggctgc

SEQ ID NO: 24390 - DNA, 50 bp, synthetic construct
  source 1..50: mol_type = other DNA
aggtcaaaccatgacctcgaaccataacgtacatgtcctatccaccctcg

SEQ ID NO: 24391 - DNA, 50 bp, synthetic construct; identical to SEQ ID NO: 24363
  source 1..50: mol_type = other DNA

SEQ ID NO: 24392 - DNA, 50 bp, synthetic construct; identical to SEQ ID NO: 23279
  source 1..50: mol_type = other DNA

SEQ ID NO: 24393 - DNA, 50 bp, synthetic construct
  source 1..50: mol_type = other DNA
taggactcattgcgccctgtgctccttaggacgcgcttagacggccctgg

SEQ ID NO: 24394 - DNA, 50 bp, synthetic construct; identical to SEQ ID NO: 23161
  source 1..50: mol_type = other DNA

SEQ ID NO: 24395 - DNA, 50 bp, synthetic construct
  source 1..50: mol_type = other DNA
ggggggtgcggaggaggggaggagggcgggtgcggggcgaggggcggggg

SEQ ID NO: 24396 - DNA, 50 bp, synthetic construct
  source 1..50: mol_type = other DNA
cctgcgaacggcagagggctagcgcacagggttcatcgcgcccggagcac

SEQ ID NO: 24397 - DNA, 50 bp, synthetic construct
  source 1..50: mol_type = other DNA
aacaagacggttctcgtagcgacccatcgattcatccctcccctatttgc

SEQ ID NO: 24398 - DNA, 50 bp, synthetic construct
  source 1..50: mol_type = other DNA
ttcggcgacatatgcgagactgcggacgggccacggccttccaattctcc

SEQ ID NO: 24399 - DNA, 50 bp, synthetic construct; identical to SEQ ID NO: 24129
  source 1..50: mol_type = other DNA

SEQ ID NO: 24400 - DNA, 50 bp, synthetic construct
  source 1..50: mol_type = other DNA
ggcatcctcttcttttattttaatactaagacgatcatcaccgcttgctt

SEQ ID NO: 24401 - DNA, 50 bp, synthetic construct
  source 1..50: mol_type = other DNA
tgacgtgttctctcttacggccatactcatcgctctccgtacgctctttg

SEQ ID NO: 24402 - DNA, 50 bp, synthetic construct; identical to SEQ ID NO: 23168
  source 1..50: mol_type = other DNA

SEQ ID NO: 24403 - DNA, 50 bp, synthetic construct
  source 1..50: mol_type = other DNA
cttacctttacggcagcgagttgcctattttcgatgggacccctattgtc

SEQ ID NO: 24404 - DNA, 50 bp, synthetic construct
  source 1..50: mol_type = other DNA
ctcccttgtgtaagataacagagcggtccatccacaaggtatataacaac

SEQ ID NO: 24405 - DNA, 50 bp, synthetic construct; identical to SEQ ID NO: 24143
  source 1..50: mol_type = other DNA

SEQ ID NO: 24406 - DNA, 50 bp, synthetic construct; identical to SEQ ID NO: 23230
  source 1..50: mol_type = other DNA

SEQ ID NO: 24407 - DNA, 50 bp, synthetic construct
  source 1..50: mol_type = other DNA
gacaactttatgctgggaaataaacaaacctaagattgggcaccttgccc

SEQ ID NO: 24408 - DNA, 50 bp, synthetic construct
  source 1..50: mol_type = other DNA
cccttttcccccgcgctttcccccttccccctcctctccccccttccccc

SEQ ID NO: 24409 - DNA, 50 bp, synthetic construct
  source 1..50: mol_type = other DNA
cctggtcaaaaattctaggtaggggggttcggcttaaccaaccttgtggt

SEQ ID NO: 24410 - DNA, 50 bp, synthetic construct
  source 1..50: mol_type = other DNA
aactttaagtgaactacggttcgtcctaggactcatgccgccctgtgctc

SEQ ID NO: 24411 - DNA, 50 bp, synthetic construct
  source 1..50: mol_type = other DNA
cactgtcacggcggtagactgccttatctaccaacttcccacatcttcga

SEQ ID NO: 24412 - DNA, 50 bp, synthetic construct
  source 1..50: mol_type = other DNA
ccggtccctaccttcacgtcactacatgcctcaactgaccatgattagcc

SEQ ID NO: 24413 - DNA, 50 bp, synthetic construct
  source 1..50: mol_type = other DNA
aagcccaattgtaccaccgttcggcaccccggactacacaccaagttcgc

SEQ ID NO: 24414 - DNA, 50 bp, synthetic construct
  source 1..50: mol_type = other DNA
cgactaccaggatacggtgtttgctcccttgtgtaagataacagagcggt

SEQ ID NO: 24415 - DNA, 50 bp, synthetic construct; identical to SEQ ID NO: 23404
  source 1..50: mol_type = other DNA

SEQ ID NO: 24416 - DNA, 50 bp, synthetic construct
  source 1..50: mol_type = other DNA
ccgaatagagggggttctcaagtgtagctgcccctccaaaccgtggagct

SEQ ID NO: 24417 - DNA, 50 bp, synthetic construct
  source 1..50: mol_type = other DNA
acatcttgcccggccgctcaatgacacacgtcgctccaattcaacaattc

SEQ ID NO: 24418 - DNA, 50 bp, synthetic construct
  source 1..50: mol_type = other DNA
gcacacttagacggtcctggtggaccattcggacttatgatggacaactg

SEQ ID NO: 24419 - DNA, 50 bp, synthetic construct
  source 1..50: mol_type = other DNA
tggtatgcggatgttcgccagcctcgtgtcgttacacactgccgcacgga

SEQ ID NO: 24420 - DNA, 50 bp, synthetic construct
  source 1..50: mol_type = other DNA
cccccccctttcccccccccccccccccccccccccttccccctttccct

SEQ ID NO: 24421 - DNA, 50 bp, synthetic construct; identical to SEQ ID NO: 23196
  source 1..50: mol_type = other DNA

SEQ ID NO: 24422 - DNA, 50 bp, synthetic construct
  source 1..50: mol_type = other DNA
ttccacgggaagcctggctaaccattggccagagtatctcacattaccgt

SEQ ID NO: 24423 - DNA, 50 bp, synthetic construct
  source 1..50: mol_type = other DNA
gggcaactttaccatcgcctactccacacccatcgcctctttaaggttag

SEQ ID NO: 24424 - DNA, 50 bp, synthetic construct
  source 1..50: mol_type = other DNA
gcttttgtctcgtctgactcgtcctaggtctcatggcgccctgtgctctt

SEQ ID NO: 24425 - DNA, 50 bp, synthetic construct
  source 1..50: mol_type = other DNA
caataccccacaatgggaagtcacttaagtatcgacaacacccccaaatg

SEQ ID NO: 24426 - DNA, 50 bp, synthetic construct
  source 1..50: mol_type = other DNA
ctcactaagtgccaattccttgatccgtttaactgggacattgaagccct

SEQ ID NO: 24427 - DNA, 50 bp, synthetic construct
  source 1..50: mol_type = other DNA
tcgctttcgcctactaccggtttggaacgcgcacactatgggcagccccc

SEQ ID NO: 24428 - DNA, 50 bp, synthetic construct
  source 1..50: mol_type = other DNA
cccatgcccgagaccttcctcctcgggcctctacccgtgactctgttccc

SEQ ID NO: 24429 - DNA, 50 bp, synthetic construct
  source 1..50: mol_type = other DNA
gccgctccaattcgtgaattccacacttcggcgtcgctctcgttcagact

SEQ ID NO: 24430 - DNA, 50 bp, synthetic construct
  source 1..50: mol_type = other DNA
tcggtgcccctcggcattcatccgtaactaggcacctaaaggcttacctc

SEQ ID NO: 24431 - DNA, 50 bp, synthetic construct
  source 1..50: mol_type = other DNA
catccgcccaacaattcagtcaacactttcaaacgccgagttggcatttt

SEQ ID NO: 24432 - DNA, 50 bp, synthetic construct
  source 1..50: mol_type = other DNA
tttgagctaaggcattcatcgccgctcgcttgcgccttctcggatttggc

SEQ ID NO: 24433 - DNA, 50 bp, synthetic construct
  source 1..50: mol_type = other DNA
ataggctaccggttgtccaactataaggacatgatctcatatatcacttc

SEQ ID NO: 24434 - DNA, 50 bp, synthetic construct
  source 1..50: mol_type = other DNA
ataggtattgacaattccaatactcttccttctgcgtcacttgactttgt

SEQ ID NO: 24435 - DNA, 50 bp, synthetic construct
  source 1..50: mol_type = other DNA
atgggcactgcgcatagggccgtcactcagccgccccctattcgaggcag

SEQ ID NO: 24436 - DNA, 50 bp, synthetic construct
  source 1..50: mol_type = other DNA
ggtaatttcgccatgcgctcgacccaagtcttgcagcactctgtcaagcc

SEQ ID NO: 24437 - DNA, 50 bp, synthetic construct
  source 1..50: mol_type = other DNA
gcatcagctacccattggtcaactataagaccatggccgaacagtggcag

SEQ ID NO: 24438 - DNA, 50 bp, synthetic construct
  source 1..50: mol_type = other DNA
acgctcccgaagtggcggatagttcagaactgtttgaggcttacgcgtag

SEQ ID NO: 24439 - DNA, 50 bp, synthetic construct; identical to SEQ ID NO: 23164
  source 1..50: mol_type = other DNA

SEQ ID NO: 24440 - DNA, 50 bp, synthetic construct
  source 1..50: mol_type = other DNA
aggtctcatgtagctctgtgctctttggaactaccttactcgcccctggt

SEQ ID NO: 24441 - DNA, 50 bp, synthetic construct
  source 1..50: mol_type = other DNA
gtccatggcttccgcgccctatcgtaatttttcatagccatcccctcgta

SEQ ID NO: 24442 - DNA, 50 bp, synthetic construct
  source 1..50: mol_type = other DNA
agctgggctttggcccactggatgggtaccagtccaacttcatttccatt

SEQ ID NO: 24443 - DNA, 50 bp, synthetic construct
  source 1..50: mol_type = other DNA
actttgggacacccttcgtcctccctggtaggaggttccgatttatgatg

SEQ ID NO: 24444 - DNA, 50 bp, synthetic construct; identical to SEQ ID NO: 23246
  source 1..50: mol_type = other DNA

SEQ ID NO: 24445 - DNA, 50 bp, synthetic construct
  source 1..50: mol_type = other DNA
tagccaatctgacggttcagatgccggctcatcggttcgggccttcccta

SEQ ID NO: 24446 - DNA, 50 bp, synthetic construct; identical to SEQ ID NO: 24438
  source 1..50: mol_type = other DNA

SEQ ID NO: 24447 - DNA, 50 bp, synthetic construct
  source 1..50: mol_type = other DNA
gacgccggatagtcgaacaaccaccccattaccgggtggttccgctaatg

SEQ ID NO: 24448 - DNA, 50 bp, synthetic construct; identical to SEQ ID NO: 24149
  source 1..50: mol_type = other DNA

SEQ ID NO: 24449 - DNA, 50 bp, synthetic construct
  source 1..50: mol_type = other DNA
gacacttttacgtccaatgggcgttgatctgcctttctggggtacctcga

SEQ ID NO: 24450 - DNA, 50 bp, synthetic construct
  source 1..50: mol_type = other DNA
tcgcgtgcattagtatgagggctcttttaggcgatttgaattaggggtgc

SEQ ID NO: 24451 - DNA, 50 bp, synthetic construct
  source 1..50: mol_type = other DNA
ggtaccagttctccctttgtcgggtctggcggtcaattccagggttttat

SEQ ID NO: 24452 - DNA, 50 bp, synthetic construct; identical to SEQ ID NO: 23272
  source 1..50: mol_type = other DNA

SEQ ID NO: 24453 - DNA, 50 bp, synthetic construct
  source 1..50: mol_type = other DNA
acatctatagcccttcttgtggctaccgcttccgtccagagacccggcag

SEQ ID NO: 24454 - DNA, 50 bp, synthetic construct
  source 1..50: mol_type = other DNA
gaggcctagcacagagggttcatcgcgccctgagcaccttagggcacact

SEQ ID NO: 24455 - DNA, 50 bp, synthetic construct; identical to SEQ ID NO: 23205
  source 1..50: mol_type = other DNA

SEQ ID NO: 24456 - DNA, 50 bp, synthetic construct
  source 1..50: mol_type = other DNA
tagttggctctaaggcgatcatcaccgctcgcttgcgccttctccggttt

SEQ ID NO: 24457 - DNA, 50 bp, synthetic construct; identical to SEQ ID NO: 23475
  source 1..50: mol_type = other DNA

SEQ ID NO: 24458 - DNA, 50 bp, synthetic construct
  source 1..50: mol_type = other DNA
tccaattctcctcgcgaatcgcattcgcttccacacttaacttcggggtc

SEQ ID NO: 24459 - DNA, 50 bp, synthetic construct
  source 1..50: mol_type = other DNA
tgttgtcactaagggactcatcgccgctcgctttcccctcttcgggtttg

SEQ ID NO: 24460 - DNA, 50 bp, synthetic construct
  source 1..50: mol_type = other DNA
ctggggccctggaaatgatatggaaccataaccgtaagccacacctaaca

SEQ ID NO: 24461 - DNA, 50 bp, synthetic construct
  source 1..50: mol_type = other DNA
gccaccatggcataccttcccggtagcgagttgcctattttcgatgggac

SEQ ID NO: 24462 - DNA, 50 bp, synthetic construct
  source 1..50: mol_type = other DNA
gtggcactctccatctcgctggctatccagttctcccgaagtggcggata

SEQ ID NO: 24463 - DNA, 50 bp, synthetic construct; identical to SEQ ID NO: 23587
  source 1..50: mol_type = other DNA

SEQ ID NO: 24464 - DNA, 50 bp, synthetic construct
  source 1..50: mol_type = other DNA
gcatcagcttacctacttgcccacctataagggcatggccgccgcatggc

SEQ ID NO: 24465 - DNA, 50 bp, synthetic construct; identical to SEQ ID NO: 23434
  source 1..50: mol_type = other DNA

SEQ ID NO: 24466 - DNA, 50 bp, synthetic construct
  source 1..50: mol_type = other DNA
catagacaatgtgtacatgtcctatccatcctcggttccttctcacttgc

SEQ ID NO: 24467 - DNA, 50 bp, synthetic construct
  source 1..50: mol_type = other DNA
tgagaacttcacgactttaagattggacaccggaacttagtccagtcccc

SEQ ID NO: 24468 - DNA, 50 bp, synthetic construct
  source 1..50: mol_type = other DNA
cctgaatggcgaccacatggtcaacagaacggtttccgtaacgacccatc

SEQ ID NO: 24469 - DNA, 50 bp, synthetic construct
  source 1..50: mol_type = other DNA
gacgctttagcattctacttcatatcccccactgcggacgggccacgacc

SEQ ID NO: 24470 - DNA, 50 bp, synthetic construct
  source 1..50: mol_type = other DNA
aaccctgactctgtgccaggtttgaggatgccctccgtcgtcactcctta

SEQ ID NO: 24471 - DNA, 50 bp, synthetic construct; identical to SEQ ID NO: 23158
  source 1..50: mol_type = other DNA

SEQ ID NO: 24472 - DNA, 50 bp, synthetic construct
  source 1..50: mol_type = other DNA
actgtggacgggccacgaccttccaattctcctctgcagtagcaactctc

SEQ ID NO: 24473 - DNA, 50 bp, synthetic construct; identical to SEQ ID NO: 23160
  source 1..50: mol_type = other DNA

SEQ ID NO: 24474 - DNA, 50 bp, synthetic construct
  source 1..50: mol_type = other DNA
gcatttcccgagcatccgccgagcagcgcaggccacactttcaggtagcg

SEQ ID NO: 24475 - DNA, 50 bp, synthetic construct
  source 1..50: mol_type = other DNA
ctcgacccaagtcttgcagcactctgtcaagccaggtataggccacaccc

SEQ ID NO: 24476 - DNA, 50 bp, synthetic construct; identical to SEQ ID NO: 24349
  source 1..50: mol_type = other DNA

SEQ ID NO: 24477 - DNA, 50 bp, synthetic construct; identical to SEQ ID NO: 23473
  source 1..50: mol_type = other DNA

SEQ ID NO: 24478 - DNA, 50 bp, synthetic construct
  source 1..50: mol_type = other DNA
ttcctccagtctttagaggacatcttacgttcccatattccaccgaaatg

SEQ ID NO: 24479 - DNA, 50 bp, synthetic construct
  source 1..50: mol_type = other DNA
cctatgctcgcaataggcctaaataacccaaatttcccacgcgtccgcct

SEQ ID NO: 24480 - DNA, 50 bp, synthetic construct
  source 1..50: mol_type = other DNA
cttagcacacacttagacggtcctggtggaccattcggacttatgaagga

SEQ ID NO: 24481 - DNA, 50 bp, synthetic construct
  source 1..50: mol_type = other DNA
cttcactcttacggccacactcatcgctctacatccactcttaggatgtg

SEQ ID NO: 24482 - DNA, 50 bp, synthetic construct
  source 1..50: mol_type = other DNA
cctacgctgtaccgctgtacctcgcctagggacttttggccagagtcaag

SEQ ID NO: 24483 - DNA, 50 bp, synthetic construct
  source 1..50: mol_type = other DNA
atggtgggactcttcaaaccgacagattgggcttcttagttgaagtcctt

SEQ ID NO: 24484 - DNA, 50 bp, synthetic construct
  source 1..50: mol_type = other DNA
gcaccgcattcagattcgtatggacagactggctatcgcatggtcatggc

SEQ ID NO: 24485 - DNA, 50 bp, synthetic construct
  source 1..50: mol_type = other DNA
agtcctacttgcgatcgatgtccgaattgtgtacgttcagctcccctttg

SEQ ID NO: 24486 - DNA, 50 bp, synthetic construct; identical to SEQ ID NO: 24320
  source 1..50: mol_type = other DNA

SEQ ID NO: 24487 - DNA, 50 bp, synthetic construct
  source 1..50: mol_type = other DNA
cgagttgcctattttccatggggcccctattgtccgactagtaagggttc

SEQ ID NO: 24488 - DNA, 50 bp, synthetic construct
  source 1..50: mol_type = other DNA
agatgcctgcaagccccaagcctgaacgtttttagcttcatgaatatctg

SEQ ID NO: 24489 - DNA, 50 bp, synthetic construct
  source 1..50: mol_type = other DNA
atttatgagggctctctggctatcacttggtcatgacacttcctttccac

SEQ ID NO: 24490 - DNA, 50 bp, synthetic construct
  source 1..50: mol_type = other DNA
gcggcccatgcccgcccgacctcacgccatcccctctgaccttaagggcc

SEQ ID NO: 24491 - DNA, 50 bp, synthetic construct
  source 1..50: mol_type = other DNA
ctccctttaatcatggcttcaggctctaccttctaccgctcttttcgaca

SEQ ID NO: 24492 - DNA, 50 bp, synthetic construct
  source 1..50: mol_type = other DNA
acatccatattcattgctatttcccccgcccttggggggagcggctttct

SEQ ID NO: 24493 - DNA, 50 bp, synthetic construct; identical to SEQ ID NO: 23149
  source 1..50: mol_type = other DNA

SEQ ID NO: 24494 - DNA, 50 bp, synthetic construct
  source 1..50: mol_type = other DNA
ccgtcttcccacggactgacgctctcactgttgagctagtctctgctttc

SEQ ID NO: 24495 - DNA, 50 bp, synthetic construct
  source 1..50: mol_type = other DNA
attactaggcctgcgacagagttggttctcgagtcactttaacatcatag

SEQ ID NO: 24496 - DNA, 50 bp, synthetic construct
  source 1..50: mol_type = other DNA
tgactttaaattttatccacataactcccttggcggacttgactttgtag

SEQ ID NO: 24497 - DNA, 50 bp, synthetic construct
  source 1..50: mol_type = other DNA
ggcgcctccccttcccccccccccctcccaaaaaaaaaaacaaaaaaaaa

SEQ ID NO: 24498 - DNA, 50 bp, synthetic construct
  source 1..50: mol_type = other DNA
caattcgtgaattccacgcctcggcttccctatggttcagaattgtcccg

SEQ ID NO: 24499 - DNA, 50 bp, synthetic construct; identical to SEQ ID NO: 23548
  source 1..50: mol_type = other DNA

SEQ ID NO: 24500 - DNA, 50 bp, synthetic construct
  source 1..50: mol_type = other DNA
cgattatggcgtattcgcgtgtcacgacgtaccgtgtcacactttttgag

SEQ ID NO: 24501 - DNA, 50 bp, synthetic construct
  source 1..50: mol_type = other DNA
cccatcttgtatgactccgcaactctctaagtaccaattccttgatccgt

SEQ ID NO: 24502 - DNA, 50 bp, synthetic construct
  source 1..50: mol_type = other DNA
gcgcgtagtcggtgccgcgccacttatgcaagggcccggaacatgtgtgg

SEQ ID NO: 24503 - DNA, 50 bp, synthetic construct; identical to SEQ ID NO: 23157
  source 1..50: mol_type = other DNA

SEQ ID NO: 24504 - DNA, 50 bp, synthetic construct
  source 1..50: mol_type = other DNA
ctacaccccgtgcaaggtgcacaaggcacagcctcgattgcgcaattcgc

SEQ ID NO: 24505 - DNA, 50 bp, synthetic construct
  source 1..50: mol_type = other DNA
actacgtgtcctatccaccctcagactctctgtgcccaaagccgagcaca

SEQ ID NO: 24506 - DNA, 50 bp, synthetic construct
  source 1..50: mol_type = other DNA
cacggccgttccaattcgtgaattccacacctcggcttctctttagctca

SEQ ID NO: 24507 - DNA, 50 bp, synthetic construct
  source 1..50: mol_type = other DNA
tgtacaagggctgctgcggtctctaccgcaaagggaagccccgcccaagt
